United States Patent Application Publication US 2004/0029123 A1 - sequence listing, part 2

SEQ ID NO: 407 - DNA, 14316 bp, Artificial Sequence
  chemically treated genomic DNA (Homo sapiens)
tttgattattatagttttgtaatatatttttaaattaggaagtatgatatttttaatttttcgttttttagtattgttttggttatttgggaatttttgtggttgtaaatgaattttattgttttttttatttttgtaaagaatgttattggaattttgatagggattgggttaaatttatatattgttttggataaatttatatattgttttggatgaatattttaataatattaatttttttgttggaatagtagttaggatttggtgtttttttttgtagttttttgaagtgtgattttgttaagttttaagtaattaaatatattatatttttggaaatatatataagaaattgatagtagtggttgtttttaaagcggggaattagatgttgggaagtaggggtgggagtgagacgttttttgttgtttttttattttttttgaattttaaataatgagaatgtatttaaataaatagaaatgaggtattaaaaattagtgtatttttataagttagatattattttgatttagattttagtaaagtggtagtaagatgtaaatatttttaaaagatatgagatattttttatttttattttttgagataaagtgttatttttttttttaggttagagtgtagtggtattattagtgtttattgtagtttcgattttttggtattaggtgatttttttatttgagttttttgagttattgggattataagtgtatatttttatcgttatttaattttttgtatttttagtagagatggggttttgttatattgtttaggttggttttgaatttttgggtttaagtgatttttcggttttggttttttaaagtgttgggattataggtatgagttattgtgtttgattatgagagaagttttgtgtaaatttggaaaatattattattttttgattttgtagattcggtattttggtttggtgttttattggagtagtttgggaattatgatttttaaggaaagagaatgttgatagttaaaattttgtttggatatgttttagagaattttatagtgatttgaaaagaatattttttgtgatgtgttttttaaaattattatataattattattttgatgttgtggatattattttttttcgtattattttttttaataaaaggataaggttagtaagtgtatatacgtttataaattaaggaagttaagtaatgtaagtataaattatttaaggaatttgttagtgatgtaattttggtttttaaattgtttttgattaaggagttttatatatgggaaggattagaaattttatggtatggaattaaagatattttttttgttttaggggtatatatagattagtattgttattgtagttttttattagatgatttttagtgattaaatttttgtttaggatttagatattttatttatttaaaatagtggacggaaaataaacgtttgatatatatgtatgtataatatttttatttatataatttttatttttttgagtgtttttttttgggttatatttaaaatttatgttagttttgtgaagaaggttgttattttttttttttgatgtatatatgtggaaaaagtgattggatagaattattttattgataagtagtatagagttaggtattttgatttttgggtttttgtttttttttttggaaaatgtttagtgatttgatttggaatgttattttttttttttaggttttgatttgatttttaaaattatgtttaaaatttttttttaagaggttgttttattaaagtttagatggtttttgttggttttaagatttttaaaaatttgtttttagtattttttattatatttagtatttattatttattatattttagtatgaatatggaatatgatttattgtattgatttatagaatttgttttattgtatttatttttttttttttttttttttttttttttttttgaaacggagttttattttgttatttaggttggagtgtagtggcgtaattttggtttattgtaattttcgtttttcgggtttaagcgatttttttgttttagttttttgagtagttgggattataggttcgtattattatatttggttaattttttatttttagtagagatagggttttattatgttggttaggttggttttaaatttttgatttcgtgattatttatttcggttttttaaagtgttgggattatagacgtgagttattgcgttcggtttgtattgattttttttttgttatttgttttttttttttattttatgtaaattattataaatagtattatttttgatttatagatatttatattttgtttttaataatttttagatgattagagaatagtagttttaaatttttgtgtatataagaataatttagggaagttattaaaaatagattttttagtgttttttttataggttttagttttgttggggggaggcgggggaggtttaggaatttgtatttttaataagtattttagaggatgttgatgtaggtgatttagtaattacgtttttagaaattttgttgttgagaattaaaaatgtgattgttattttttgtttagtaggggaaatagaggtgtaaaataaaataattgagtttttgtttttttggtgttgataaatttttagttgtgagtggtgtggatattaaatgtaataggaatataaagaagggaggtattatttttggttggattgttaagttttataaaagatagggggtttgaagaaaagaaattttaaaaagatgaaaaaaaaatgggtcgggcgcggtggtttacgtttgtaattttagcgttttgggaggcggaggtggtcgaattacgaggttaggagttcgagataagtttgggtaatatggtgaaatttcgtcgttattaaaaatataaaaaattagtcgggcgtggtggtaggtgtttgtaattttagttattcgggaggttgaggtaggagaatcgtttgaattcgggaggcggagtatgtagtgagtcgagattgtgttattattgtattttagtttgggtgatagagtaagatttcgttttaaaaaagaaaaaaaaaagtggattattttaagatgttggaatagtaaagattaagtgttgaggatgtataattttttttaggggattagtatgtggaatgatgtgtttgaattaaaaagagtttttgtgggtatatgtaggaatttatatttggaaagataggagttagatcgtagagagttttgaatttggattttattttgtaggtattgggtggttttttaaatacgtaggtaagataaaagtgattttaaaagattgatgtggtagtgagtttgaaagtcgtgaattacgtttggcggtttttgtatatattgggagaaacgttaattgtgaaagtagatttaatatgatttggagtttgattatgtgagaaagcgaaaagtgttagaaacgttgttgaggtttgaatttttttgattgggaggattatgtgtaattttatcgtttagtaaatttgaaggaggaaatgttttgaggatagtatgtttggttttaggtttagaatttaattttttgttaaatttggaattttttgtatatatgtattaggtggtttcgtttaaatatacgataattatttttattatgttgaaaggaaaaggtttggagttcgagggaggggattatagatttgggtttattggcgtaaagggaggttgattgtttagattaataattattaacggttatcgtatggaaagtattgtacgaaaaattaagatgattagttttcgtttttaagaaatttaaaatttagacggaatttttaagaaagagatttcggtaagagtatatggtaagtttttatatttatatattattgattaatgaatttgtatttttttcgttggagtagttgagggtttttggtttaaggaggggtgaaaattagtaggatattaaattgggaatgagaaatttttttttagagggcgtggatttgtagaattttttgaagtagtagatgttagattgtttaaattttacgcgagagtagttttttggagttgcggagttcgaattttttaagagttataaatttatttcgtaattattaattttgcggtttggggttagtaaggcgttaagattcgtttaggtgtttagatttcgtaacgattggacgagtttattttttcgtttttttcgggtttttcgttcgttaattatattgtttgttcgttatttgatttttgttgcgtttttttttagtggtgtaatatttggcgttttttcgcgttttagtttttcggcgttttattaatcgttttagttttttattggttagtagagaggtgagggaagggaaggggcgttttattttgttttttgaacgtatttttttaagttttttagttttttcgtagacggttaggagagtaatgatagtttggagtagtcgcgcgtgagcgtaaaaatgttcgttggtggaggagcgtttttttttttttttaagcgatttgtcgtatttgttttgacgtaggggtatttcgttcgtcgtttttatttacgattggttgtggtcgaagttcgttatatagttcgttttatttttttgttttaagaggtcgtattttacgtcgtcgttgtcgtttagtcgtgtgattggttaagagggttggtatgttttttcgttttttttttcgtcgtcgtattaagaggcgggcgggatttcgcggaagttgttagttaaattttttttttttattttttgcgaggttttttttcgggtcgcgcgttttggcgcgcgtatacgcgtatatattttttagtcgtttgtattaattatttttttaagttgtagcggtcgttcgtttggggtttttcgtgggcggtcgacgggcgcgtgggggagggggttcgggtcgtttagcgcggtaaggagcgagtgtgtgtacgtagagggtcggggttacggggtagcgtttcgggcgatgaggggtcggcgttgatcgggaagagcgggtatcgcggtagtggtttcgaggggattcgcgatggtagcgttttgagaggaggttttaggtagggcgggttgcgttggtagcggtcgttgaggtgttggtcggtcggttggttggcgacgggggtagaagcgacgagaggcgcgttcggtattcgtattttcgtgttttcgttttagttgtttaaatttcgggtttttttttattcgttttgcgcgtttagagttaataatttttttattttttttcgttttcgttttttttttcgttagtttcgggagttcgtcgcgcgtcggggattaggaattttcggcgttgagatgtggtcgtgaggcgttggcgggcggcgaggagaagttcggcggcgtttcggggtcggagggtcgtggggtcggggcgtaggggcgcgagtatttcgcgtttttttttcgtttttttttgtcgttttcgtcgttgttcgtgttttgtaagtagtagtcggagttgttaagcgttagggtcgcggagatgtcgtcgtcgtcgtcgtcggcgggggttgttagcgtcgttatttcggtttcggagaaagtggacggttttattcggaaatcggttcgtaaggcgtagaggtagaagcgtttttagggttcgtcgtagtttcgtagttagggtagttaggtagagttgtattcgttgttttagtttaaaggtaattttcgagggcgtagttttagtagcgagcgtaggggttggtaacgtttgtttttgcgttagtagagttattttttgttgggttttttttgtttagttgggattggtagtgtgtgagtcgagttttttataatgttttggcgttattttacgtttttttttttatttaaataggttttttgtgaagttttggttgtttttttttaatttttatttgaattttttttattttaggggaggttaatatttttttttatttgcgcgtttgtttaatttgtattttttattttgcgtttcgtgaagtagagttttttattttttttttaggtttgttttttttcggttttgttttaataatcgtacgaatttttttcgatttttattttttcgagtgttagtttttttgttcggttatttttagttagttttttatttttatagttataaagtcgtttgtatttattttttttttaattttattttttattgattgtttttaagagttattagattaggaattcgaatgtaaataacggttaagagttagttggtttttggatgtatttataaagaaaaagtttaaaatttgattagtgtagtattttatttataggatcgttagttttaaatggtattttttagtttaaggaatagatttaaaatattttgttgtttgagtcgatatatatggtttatttggaaatacgaaggagtaggtagtgttgttttgtagtcgaatgggaatttagtttgttaggtagtgattttagggattttgtaggtttgtataggaatttaaattggtattcgtgtttaatgttttgtaggagaatttggtattttttttggtttattttttttattaggtttagaggattttcgatgttattttttggtgttttagtttattttttgtgtattatttatgtttaattttataattttaatgtttttgttttttatgagatagaaatgttggaataagatgataatgtttttatatatttagataaaatttgtaatttgacggaaatttttattatttgatgtttagattttttaatttatttgaaaaagttgtagtattttttttaaggttagtttggtttttatttgtttttgggtttgtgaatttagttttagtttggtaaggagtttaaagaaaattttagattaaattatagttgatttataatagttttagaattttattgagattttattttgttttgatttttggagtgtttttaaattatgatattttatagttagaattaaattggtttttgaatagagattttgagatattagtttgtgttatcgaatttattatttgattgttttttagtatataaaaattgttaaaatttatatagtaaaatggtagattataatgataggtattgttaagattttaatttttgaatgatgttatagttataaaagaatatcgtttttgttatttatagattttaaaatttatatttatttaaaatattatagtttttttatattattgatttttttttttttattaaattgttaaattgtagtttgaaggtttggtgttagggttattttatagttatttaatttgttttttagtaagatattttagttttttagtattgtattttttaatagtatattttaataaaagtaattgaatattaaatatttggttggttttaagttaggagatgtagttttgataggttttgtttttattttatttattttattttatttttttattttcgttgtttaggttggagtgtaatggcgcgattttagtttattgtaattttcgtttttcgggtttaaataatttttttgttttagttttttaattagttgggattataggtatgtgttattatggtcggttaatttcgtatttttagtagagatggggttttattatgttggtgaggttggtttttaatttttgattttaggtgattaggttattttagttttttaaagtggtgggattataggcgtgagttatcgtatttggttatattttgtttttaaaagtttggaaaaatatgtatagagttagtaattatttaagttatatgatgtagggtttaataagttgaaggtgttatatagtatttggttattagtaaagaagaaagtaaattggaattttatattaattgtagatatttgtatgaaaatatagtatttattataaggaaaattatgtatttaggataaatttatgtaaatttaattgaggaaataagatttttatttggattataaattaataggaataattttttttattttagatgttaaaatgtttgtaagtgatttaaaaaaaaaatattaatatttaattgttttaattggaattttggtagtgtatttgatattatagtgttgtgttttttttgttagtggtagttttttttatttgtggtttttataaaaatatggaaagttttttagtatgtgtatgaaagaaagaatttttttttttttttgaaatattattttattgtggagtgatttagatatttatggattttaagattttttaagttttatattagtttgtttatgttatattttgattatatgtatttgaattggaaaggtgttaattagttttttttaaattatagtaaggattaataaaataatttagtttttttatttgtaagaagtatttgtgtaaaataatttagtaagtgggttgtgggattttaatggtaaaaatgtttagaataaattgttttataattgaaagtatttaataaataataagttttgttaaaaggttttttagtttaatttattttgtttaagattttggaaggtttggtttggtaaagtagttgatgttttatatttatataatattttagtattttgaaattattttattttaaaaatttttttaaattataaaatagtattgtttatattaagtgaaataatttaaagatatgtaatttttaatttttgtgtattttttgtttttttatatttagtaagtaagggtaatattgttgtttgataatttatggtttattgtatttttataaatattttatttattgggttatttttgaattttttgtaaggttagtatttttattttattgatgagaaagttgaggtttaaaaagaatagtttttggtttgtgattatttatttggatgatgttgtagttgatattgggatttaggttaaatgattttagtatttgtgttgttaattgttttatgtaaatttgaagtagtgtgatagagttgggtttttggggttagttttgggttaaaggtaaatttttaatttttttaagtcgttttttttatttgtaaaatggggataatataaatttttttaggtttgtggggattaaggggaataatttaagtgtttaaaaataggtaaagaatgttagtttttatttttttaaatatttgaaaatttagattaaaaatatttttaaatgaaggattattaataggattatttatttaaatggtaaatttttttagtgtatttaaagtgtgattttatttataattagtttttagatatgatttatgtgatttgaagtgtagttgtaatattttttagtacgagtgtagaaatggaaataggattaagttagattttttaaaatattaaaagttgtgataagatttttttattaagcgaagaaattaatttaattagtagaattatatagatgtgtagttattttaggagatagtcgggaaataaatagtaagataggttgaaattggttttgagattgaagttttttttagaagaggtaaaatttttttaagtagtatttaagattttttgttggtttatttttagtaattgtgttttattagaggtattgaggttagtaatagtggtgttgattgtagtgtttttttatttttagggggaaaaatgtgtgtgttttttaaagtaggtgatttaaggtaattgtggaataagaatattgatattattttaagttttatagttaaatttttttgtggagagaaaatcgtattatttatttaatttttaaggtttatagatttttttaaagttattattattttatttaaatatagttgggatggtattagaggagagtttaaatttatttgaagatgttaagaaaattgtttattaaaggaaataatattttagttattttaggattattttttgagatattttttttggaagatttatttttaaaaaatttaaaatatttttaggatatttttaagagaaattgttaaataaagtgtttattgttagtttttatataaaggaaaaatttttttatttaaatttattttaatatttttagaatttttgtttaggattattttttttttttttttattttattattttatttgattgttaattgtggattattttatgaagtgtttaattgaataaagtgttaatttaataaaatgtatttggtaaaataatgtaattattgtagtatgttattgttatgtaaatagtagatttaaattgtttttttgtattagtgatgatttattttttttaattttagtttagttatttttatttgtaagaataatattttttttttgataaaataataaagatgaattagtttttaaggagttattgttgttttggattttaaagataggtttattaatagaaataatatatttagatttttgtgttttatttttaaaagttagatttttgtaaaaagttggggataaagattagtttgtttttatgtgtttagtattgtggtttttaattttggttatatttggagaggttatttattttattttattttttttttttttagattgagtttcgttgtgtttttaggttagagtgtagtggtacgatttttcggtttattgttatttttgttttttaggtttaagcgatttttttgtatgtattattatgttaagttaatttttgtatttttaggagagataggggttttgttatggttggttaggttggttttgaatttttgattttaggtgttttgtttgttttggttttttaaagttatgggattataggcgtgagttattgtattcggtttatatttggagagtttaaaataaaataaaataaaataaaaaattaatatttgggtatatttttaagagattgtaaattaattggtttaaggtaaaatttatttatagtatttttaaaagtttttagggtgattttaacgcgtagttaggattgagaattatcgggttagtattgtttgtttattgatttaatttattaattgagatttcgtttttttttttttgatatttatggtttattatttagtttattaatattttttgttttggttttattttttgttatttatattttatttttttaattttgttgttttttatagtttattagttgtttttttgaaggggagatattgttattagattttggagtttaggtatgatggtatgattttattggtttattgttattattataattaaagtttaattattatttgatgtagggtggttagtttttttttttttgtgatttttggagttggtaggtaaaatcgagaatatgtgatagaggtttgtttaattttaattttattatttaggataataagtaatgattttaattattttgggatgtaaaattagttttttttgtatgtttataatattgttttgttttttgaagatttaggtttgatattattattgtatatgttaaatataagatattgaataaaggaattatttttgaattttattgcgtttttggttatgttttatttttattttatattaagaaatgtttttttttagagtgttttcgtgtttattatttaatttaattttgattataattttttatcgaaggtagggtagtgagaatttagggttgtttatattttatatttttattttgtttttgttttttttggtaattggtttgaataatatttttgttagttgatttgttgtttgggtggttttttagttgttatgttgtgatgttttttttttagaatgagatggtgaatttttttgtgaaagtagagttattatttgtttttttaaattttgttatggtattaaatatagtattttgtgtataatgtggttatagagatagagttagtgttttgatgaagaaattatatgttggttgttttatagttatttttttttttttagattgtgttgtttttagtgatgtttggtgttatttattagatgttgatttttttttgttttgttttttggttttttatatttttttgagatagggttttgttttattatttaggttggagtgtagtggtataattgtaatttattgtagttttaaatttttgggtttaggtaattgttttaagtagttaggattataggtgtgtgttgttatatttagttaagttttttatttttatttttgtatagataagttttcgttatgttgttttggttggttttgaatttttggttttatgtgatttttcgtttttggttttttaaaagttgggattatagatgtgaattattgttttatttagttttttggttttaatatatttatgtttaaaacgggtttaggattatttaaaataggggaatttaagggagagaatatagttatgggtttttagtttttgtttttggttgtgttagtaaagtttttttttcgttttttttttttgtttattattagagatagaaattaaaaattatggttttaggatgttaaaagtttaaaataaaacgaaatagaataataataataaaataaggtgggttggataagtttgatttaaagtaaatgaattttgggtttttaatattttggtagtaaatagtaaatgtaggtttaaaataaaagattatttgtattttgttaatgattagtatgagtgatatgtaatattattgattgatttgttgttatgaaagttattgtataagatttgtgaggaaaagtaatatcgggttgatttttagatatggatatgtgtgtataaaataattgaaataatttgtttgtagtaatttttaagtttaagatgtaatttttttttataaggatgtttttgaaggaggtaaaaggaatagatttgaaatatataatatttttagtgtattattatgtaataaggaatttaaatgttttgttgaaagagttttatatgatagattgggattatgtaaaataaattttatttttttgagtaggatgttgattaataagtagttttaagtttagtttttatatttgtttttttgaattgttatttgaaggattttatttatgtgggatttttaagtaagtaatgaagaattttagaaattttgtaattttgattgggtttgttgaagaaatatattggaatttttttttttttggtgggggtagtttaatttggatattgaagataagggattttttggaaatatattttttttattggaatggtgatgttaattgtcgttattatataattttattgtgatgttatatttagttgagttttttagtgttgaatgggattttagaagttattttggtttagtttttgttgggaattgattttatttttgttattttaataaatattttgttattttattagagaagttttttttaaggtagggaggaaagtatagggttttaaaatttttatttttttaggttttgtttagttaatgaataaattatttagataatagttaaaagaggttgaatatttgaaataagaatttttaaatggtttagaatttgtagtttagtagtattaaatttaaaattgtatatttttttttagtagaacgtagattttaaaaaattgtatattttgtttaattggttttgtttttgttttatattgtattaaggatattttataattatagttattattataagttaatggttatttgaatttattgttaattttttgtttttaaattgataaaagtgaaaaagggaaaaaggtgagatagtttttgttataatttttgaattttaattagtaaaattgggtagatttttaaaataattttttagataggtttttttgaagaaaaatatttattgaagttaaaagtaaaataagatataatttttgtaggaatgtttttaattttattaaaataaataaaaataataataaaaacgtgttttattatttttttttaaattggttagtggtaaaatattttgtttgttgtgaaattagatatatattttatttttaaaaatttagtatagaaatttttttttttttttggttttttatagtgtataaaattttggtgaatcgttgtagagattaaaatttagtaaagtgaaaataatgatgaatgtttttttttttaaatttaatgtttttaggagtttatagttggtgaatatagatttgtaagtaggtagttgtaattaatgtgtttagtgttatgataagaataagttttaaaatgttaagggagtatgtgaaggatttaatttcgttttagtaggggaggggagcgattagggaaagtt

SEQ ID NO: 408 - DNA, 14316 bp, Artificial Sequence
  chemically treated genomic DNA (Homo sapiens)
aattttttttgatcgttttttttttttattaaaacgggattgagttttttatatatttttttaatattttagagtttatttttattatgatattgaatatattaattgtaattgtttgtttataagtttgtatttattaattataaatttttaaagatattaaatttaaaagaaaaagtatttattattgtttttattttattaagttttaatttttgtagcggtttattaaaattttatgtattatggaaaattaaagaaaggaaaagatttttgtattagatttttgaaaataaagtgtgtgtttaattttatagtaaataaaatattttgttattgattaatttaaagaagaatggtagggtacgtttttgttgttgtttttgtttgttttaataaaattagaaatatttttatagaagttatgttttattttatttttaattttaatagatatttttttttagaaaagtttgtttgaaaagttgttttaaaaatttatttagttttgttaattaaaatttaggagttataataaaaattgttttattttttttttttttttatttttattaatttagaggtaggggattaataatgagtttaaataattattgatttatggtaatagttgtaattatggaatatttttgatataatgtgaaataaaggtaaaattaattagataaaatatataattttttaaaatttgcgttttgttggaaaaaaatatataattttagatttgatattattgaattgtaagttttaagttatttaaaaatttttgttttaggtatttaattttttttagttattatttaaatggtttatttattaattaagtaaaatttgagagaataagggttttaaaattttgtatttttttttttattttaaagaaaatttttttgatgaaatggtaagatatttattagaataataagagtgaaattaatttttaatagaggttaaattagaatgatttttgagattttatttagtattggaaagtttaattagatataatattatagtaaggttatatagtagcggtaattagtattattattttagtaggaggagtgtgtttttaagaaattttttgtttttagtatttaagttagattatttttattaaaaaaaaaaaaattttagtatgtttttttagtaaatttaattaaaattataggatttttaaaattttttattatttatttaaaagttttatataaataaaattttttaggtaatagtttaaaaagatagatataaaaattaggtttgaaattgtttattagttaatattttgtttagagaagtagagtttattttgtataattttagtttgttatataaaatttttttagtaaagtatttagattttttgttatataataatatattaaaagtattatatattttaaatttgttttttttattttttttaaggatatttttataaagaaagattgtattttaaatttagaaattattgtaaataaattgttttagttattttatatatatatgtttatgtttaggagttaattcggtattatttttttttataaattttatataataatttttatagtaataaattaattaataatgttatatgttatttatattggttattggtaaaatataaataattttttgttttaaatttatatttattatttattattaagatattaaggatttagaatttatttattttaaattaagtttgtttaatttattttattttgttgttgttgttttgtttcgttttgttttaggtttttagtattttgaagttatggtttttagtttttgtttttagtgataagtagaaaagaaggacgaggaaggggttttattggtataattaaaaatagaaattaagaatttatgattgtatttttttttttggatttttttgttttaaataattttgaattcgttttaggtataaatatattaaaattaaaaaattgggtgaggtagtgatttatatttgtaattttagtttttgggaagttaaagacggaggattatatgaggttaggagtttaagattagttaggataatatagcgagaatttgtttgtataagaataaaaataaaaaatttagttgggtgtggtagtatatatttgtagttttagttatttgggataattgtttgagtttagaagtttgaggttgtagtaagttataattgtgttattatattttagtttgggtgatagagtaagattttgttttaaaaaaatatggaaaattaaaaaataaaatagaaaagaattaatatttggtagatagtattaaatattattaaaagtagtataatttaaaggggaaggagtgattataagataattaatatataatttttttattaaaatattgattttgtttttatgattatattatgtataaaatattgtatttggtattataataggatttgaaaaaatagataatgattttgtttttatagaaaaatttattattttattttggagagagagtattataatataataattgaaaagttatttaaataataaattaattaatagaagtattatttaaattagttattagaaaagataaagataaaataggaatatggaatataagtagttttgagtttttattgttttgttttcgataaaaagttgtggttaagattaagttagatgatagatacgaaaatattttggagaaaaatattttttaatgtgaaataaaaataaggtatgattaaaaacgtagtaaagtttaagaatagtttttttgtttaatattttgtatttaatatatataatggtagtattaggtttagatttttaagaaatagaatagtgttgtgagtatatagaggaaattagttttatattttaaagtggttgaaattattatttattattttgaatgatgggattaaaattaggtaaatttttattatatgttttcgattttatttgttagttttaaaaattatagagaaaagaaaattgattattttatattaaataatagttgggttttaattatggtaatgataataaattagtagaattatgttattatatttaaattttagaatttaatggtagtattttttttttaggaaagtagttaataagttatagggggtagtaaagttaagagagtgaaatgtaaatagtaggaggtgaagttagggtaggaaatgttaataggttgggtaatgaattatgagtattagagagaaaaggacgaagttttaattaatgaattaaattaatagatagataatgttaattcggtgatttttaattttggttgcgcgttagaattattttgggagtttttaaaaatattgtaagtggattttattttaggttaattaatttataattttttagggatgtgtttaggtattgattttttgttttgttttgttttgttttaaattttttaggtataggtcgggtgtaatggtttacgtttgtaattttataattttgggaggttaaggtaggtagaatatttggggttaggagtttaaaattagtttgattagttatggtaaaatttttattttttttaaaaatataaaaattagtttggtatggtggtgtatgtaagagaatcgtttgaatttgggaggtagaggtggtagtgagtcgagagatcgtgttattgtattttagtttggggatatagcgagatttagtttgaaaaaaaaaaaaataaaataaaataaatgatttttttaagtatagttaggattgggaattatagtgttaaatatataaaaataaattagtttttatttttagttttttataaaaatttaatttttaaaaatgaaatataaaaatttaaatgtgttatttttgttagtaaatttgtttttgaaatttaaggtagtaataattttttaaagattaatttatttttgttattttattaagagaaaaatgttatttttgtaggtgaaaatggttaaattgaagttgaaaggaatgagttattattgatgtaggaagataatttaaatttattgtttatatgatagtaatatattataatggttgtattattttattaaatatattttattggattagtattttatttagttagatattttataaaataatttataattaataattagataaggtaataaaatggagaggaggaagagatgattttaaataggaattttaaagatgttaaaatgggtttaaatagaaaagttttttttttatgtgaggattagtagtgaatattttatttagtaattttttttaagaatattttaaaaatgttttaaattttttaaaaataaattttttagaagagatattttagaaaatagttttaaaatgattaaaatgttattttttttagtaaataatttttttaatatttttagatgaatttgaatttttttttagtgttattttaattgtgtttagatggaatgatagtaattttgagaagatttataaattttaaaagttgagtgagtagtacggttttttttttataaaaaggtttagttatagaatttaagataatgttagtgtttttgttttataattattttagattatttattttagaaaatatatatatttttttttttaaaggtaaggaagtattgtaattaatattattattattggttttaatatttttagtgggatatagttgttaagaatggattaataaagaattttgagtgttatttgggaaagttttattttttttgaaggggattttaattttaaagttagttttagtttattttgttatttatttttcggttgttttttaagatgattgtatatttatataattttattggttaggttgattttttcgtttggtaaaaaaattttattatagtttttaatgttttaaagagtttgatttaattttatttttatttttatattcgtgttgaaagatgttgtagttgtattttagattatataaattatatttgaaaattgattataaataaaattatattttaaatatattaggaaagtttattatttaagtaagtaattttattaataattttttatttaaaaatatttttaatttggatttttaaatatttaagagaatgggaattaatattttttgtttatttttaggtatttaaattattttttttaatttttataggtttggggagatttgtattatttttattttatagataaggaaaacgatttagaaagattaaaaatttatttttgatttaggattaattttagagatttaattttattatattgttttaaatttatataaaatagttaatagtataaatattgaaattatttgatttaggttttagtgttagttgtaatattatttagataagtaattataggttagaaattattttttttaggttttaatttttttattaataaaatgggaatattgattttgtaaaaagtttagggatgatttaatgaataggatgtttgtaaaaatataatgagttatggattattaaataatagtattatttttatttattaggtgtgaaaaagtaggagatatatagggattaagggttatatatttttggattgttttatttggtatgaataatattgttttataatttaagaaaatttttaaggtaaaataattttaaaatgttaaaatgttatataaatgtaaggtattaattattttattaaattaagttttttagaattttaaataaaataggttagattgaaaagttttttaataaggtttgttgtttattaaatatttttaattataaaataatttattttgaatatttttgttattaaaattttataatttatttattaaattattttgtataaatattttttataggtgaaaaggttggattattttgttaatttttattatggtttgaggaaaattagttggtatttttttagtttagatgtatgtggttaaagtgtaatataagtaggttggtatgaaatttaaaagattttggagtttatggatatttgaattattttatagtaagatggtattttagaggaggaagaaaatttttttttttatatatatattaaagggttttttatgtttttgtgaaggttataaatggaaaaaattattattggtagaaaaaatataatattgtggtattaagtatattgttaaagttttaattgaagtaattgaatgttggtgttttttttttaaattatttgtaagtattttggtatttggagtaaaagaagttgtttttattagtttgtaatttaagtaagggttttatttttttaattaaatttgtataaatttattttgaatatataattttttttatgatgaatattgtatttttatgtaaatatttataattaatgtaaagttttaatttatttttttttttattagtgattaaatattatatggtatttttaatttgttgaattttatattatataatttagatgattattgattttatgtatatttttttaagtttttaaaagtaaaatgtggttaggtgcggtggtttacgtttgtaattttattattttgggaggttgaggtggtttgattatttgaggttaggagttggagattagttttattaatatggtgaaattttatttttattaagaatacgaaattagtcggttatggtgatatatgtttgtaattttagttagttgggaggttgaggtagaagaattgtttgaattcgggaggcggaggttgtagtgagttgagatcgcgttattgtattttagtttgagtaacgaaagtgaaaaaataaaataaaataaataaaataaaagtaaaatttattaaagttgtattttttggtttgaaattaattaaatgtttaatatttaattatttttattaaagtatattattaagaagtataatattaagaaattagaatattttattaaaaagtaaattaaataattatgaaataattttagtattaaatttttaaattatagtttgataatttaatgggagaaaaaaaattagtagtataaaaaaattatgatattttaaataagtgtaaattttaaaatttatgaatagtaaagacgatatttttttatagttatgatattatttaagaattaaagttttggtaatgtttattattatagtttattattttgttatgtaaattttaataatttttatatgttaaagagtaattaaatgataaattcgatagtatagattaatattttaaaatttttgtttaaaagttagtttgattttaattgtgagatgttatgatttagaagtattttaagagttagggtaaggtagggttttaatagggttttggagttgttgtaggttaattgtgatttgatttggggttttttttagattttttgttaaattaaggttggatttataggtttaaagataaatgagaattagattggttttgaaggggatgttgtagtttttttaaatgaattgaaaaatttgaatattagatgatagggattttcgttaggttgtaaattttatttaaatatgtaggagtattattattttgttttaatatttttattttataaaaagtaaggatattaaaattataaaattaagtatgagtaatatataaagaataaattagaatattaggaaataatatcgaaaattttttaaatttagtgggaaaagtgagttaaaaagagtgttaagtttttttgtaaggtattaggtacggatattaatttgaatttttgtataaatttataaagtttttggaattattgtttggtaaattaagtttttattcgattgtaaagtaatattatttattttttcgtatttttaaatagattatgtgtatcggtttagataatagaatattttaaatttattttttgagttaaaggatattatttaaagttaacgattttgtgaataagatattatattggttaaattttaggttttttttttataaatatatttaaaggttagttaatttttaatcgttgtttgtattcggatttttggtttgatgatttttaggggtaattaatgggaagtgaagttgagaagaaggtgggtgtagacggttttataattgtaaaagtaaaggattagttaaaagtggtcgaatagaggagttgatattcgggaaagtgaaggtcggggaaggttcgtgcggttgttaaagtaagatcgggaaagggtaaatttggaagaggagtgaaggattttattttacgggacgtaagataggaagtgtaggttaagtaagcgcgtaggtggggaagggtgttggttttttttaggatggaaagagtttaggtgggaattagaaggaaatagttaagattttatagaaaatttgtttgaataaggaggagggcgtgaggtgacgttaaggtattgtggggaattcggtttatatattattagttttaattgagtaggagaaatttagtaggaaatggttttgttggcgtagaggtaagcgttgttagtttttgcgttcgttgttggggttgcgttttcggaggttatttttgagttgaggtagcgggtgtagttttgtttggttgttttggttgcgaaattgcgacgagttttgggagcgtttttgtttttgcgttttgcggatcgattttcgggtgaagtcgtttatttttttcgaggtcgagatggcggcgttggtagttttcgtcggcggcgacgacgacgatattttcgcggttttgacgtttggtagtttcggttgttgtttgtaaggtacgggtagcggcggagacggtaggaggaggcgggggagaggcgcggggtgttcgcgtttttgcgtttcggttttacggtttttcggtttcgggacgtcgtcgagttttttttcgtcgttcgttaacgttttacggttatattttagcgtcggaggtttttggttttcggcgcgcggcgagttttcggggttgacggagggaagggcgggggcggaggggggtgaagaagttgttgattttgggcgcgtagagcgggtggaagagagttcgaagtttagataattgaggcgggggtacgggggtgcgggtgtcgagcgcgtttttcgtcgtttttgttttcgtcgttagttagtcggtcggttagtattttagcggtcgttgttagcgtagttcgttttgtttggagtttttttttagggcgttgttatcgcgggttttttcggagttattgtcgcggtgttcgtttttttcggttaacgtcggttttttatcgttcggggcgttgtttcgtagtttcggttttttgcgtgtatatattcgttttttgtcgcgttgggcggttcgaatttttttttttacgcgttcgtcggtcgtttacggagaattttaggcgagcgatcgttataatttgagaaggtggttggtataggcgattggggagtgtgtgcgcgtgtgcgcgcgttagggcgcgcggttcggggaggggtttcgtaaggggtgggaaggaggggtttgattgataattttcgcggggtttcgttcgttttttggtgcggcggcggggaagggggcgggaaagtatgttagtttttttagttaattatacggttaagcggtagcgacggcgtgaggtgcggttttttgaggtagaggagtggggcgggttgtgtgacgggtttcggttatagttaatcgtaagtgaagacggcgagcggggtgtttttgcgttagaataaatgcggtaaatcgtttgggagggaggggaagcgtttttttattagcgggtatttttgcgtttacgcgcgattgttttaggttgttattgtttttttgatcgtttacgagaagattgggaaatttgagagggtgcgtttagagagtaaaatagagcgttttttttttttttttatttttttgttggttaatgaagaattgaagcgattggtggggcgtcggagggttggggcgcgaaagagcgttaggtgttatattattgaaagggggcgtagtagaggttaggtggcgagtaagtagtgtgattgacgggcgaggggttcggggaaagcgagaaggtgagttcgtttaatcgttgcgaggtttggatatttgggcgggttttggcgttttattggttttaaatcgtaaaattggtagttgcggaataaatttgtagtttttgggaggttcggatttcgtaattttagagagttattttcgcgtggggtttgggtagtttagtatttgttgttttaaagagttttgtaagtttacgttttttaaaaagagattttttatttttaatttagtattttgttaatttttatttttttttgagttaaaggtttttaattattttaacgagaagagtataaatttattggttagtggtgtgtggatatggaggtttgttatgtatttttatcggaattttttttttggagatttcgtttagattttgaattttttaaggacgaggattggttattttagtttttcgtgtagtgttttttatacggtggtcgttaataattattaatttgaatagttagtttttttttgcgttaatggatttaaatttgtaattttttttttcgagttttagattttttttttttaatataataaaagtaattgtcgtatatttaaacgaagttatttgatgtatatgtatagaagattttaaatttggtaggaagttgaattttagatttagaattaaatatattatttttaaaatatttttttttttagatttgttgggcggtgaaattgtatataatttttttagttaaggaggtttaaattttagtagcgtttttgatatttttcgtttttttatatagttaagttttagattatgttaaatttatttttataattggcgttttttttaatgtgtataaagatcgttaaacgtagtttacggtttttaaatttattgttatattaattttttaagattatttttattttatttgcgtgtttgaggaattatttaatatttgtagaatagagtttaaatttaagattttttgcgatttgatttttgtttttttaagtgtaaatttttatatgtgtttataaaaattttttttagtttaggtatattattttatatattgattttttaaaagaagttatgtatttttaatatttagtttttgttgttttaatattttgaaataatttattttttttttttttttttgagacggagttttgttttgttatttaggttggagtgtaatggtggtataatttcggtttattgtatgtttcgtttttcgggtttaagcgatttttttgttttagtttttcgagtagttgggattataggtatttgttattacgttcggttaattttttgtatttttagtagcgacggggttttattatgttgtttaggtttgtttcgaatttttgatttcgtgattcggttattttcgttttttaaagcgttgggattataggcgtgagttatcgcgttcggtttattttttttttatttttttgaaattttttttttttaaattttttattttttatgaagtttgataatttagttagaagtgatgttttttttttttgtatttttattgtatttagtgtttatattatttatagttgaaagtttgttaatattaagagagtaagaatttagttattttattttatatttttgttttttttattgagtagaggataataattatatttttagtttttaatagtagaatttttgaaagcgtggttattggattatttgtattagtattttttggggtgtttattgaaaatgtagatttttggatttttttcgtttttttttaatagaattagaatttatgggaagagtattgagaagtttatttttaataatttttttaggttatttttatgtatataaaagtttggaattattattttttagttatttagaagttattaaaaatagaatgtaaatgtttgtaagttaggagtagtattatttataataatttatataaaataagaaagggagataaatagtagaaagaaaattagtataggtcgggcgtagtggtttacgtttgtaattttagtattttgggaggtcgaggtgggtgattacgaggttaggagtttgagattagtttggttaatatggtgaaattttgtttttattaaaaataaaaaattagttaggtgtggtggtacgagtttgtagttttagttatttaggaggttgaggtagaagaatcgtttgaattcgggaggcggaggttgtagtgagttaagattgcgttattgtattttagtttgggtgatagagtgagatttcgttttaaaaaagaaaaaaaaaaaaagaaaagaaaaaaataaatataataaagtaaattttgtaagttaatataataaattatattttatgtttatattggaatgtgataaataatagatattggatataatagaaaatattggaaataagtttttgggagttttggaattagtaaaaattatttgggttttggtgaaatagttttttggggaagaattttgagtataattttaaagattaagttaaaatttgaaaagagaggatggtattttagattaagttattaagtattttttagggggaagaataaaagtttaagaattaaaatgtttgattttgtgttatttattaatagaatgattttgtttagttattttttttatatgtgtatattagaaaaaaaaaatgataattttttttatagggttggtatgagttttaaatatgatttaagaaaaaatatttagggaaataaaaattatgtagatgaaaatattatgtatatatgtatattaaacgtttatttttcgtttattattttgagtaaataaggtatttgggttttagatagagatttggttattaagaattatttaataggaaattgtaatgatagtattaatttatatgtgtttttgaagtaggaagagtgtttttgattttatgttatagaatttttgattttttttatatgtgaagttttttggttaagagtaatttagaggttaggattgtattattaataaattttttggatggtttgtgtttatattatttaatttttttagtttataaacgtatatatatttattgattttatttttttgttgagaaaaatgatgcgagaaaaagtaatatttataatattaaaataatggttgtgtaatggttttaaagagtatattatagagagtgttttttttaaattattgtgaaattttttaaagtatatttaagtaaagttttgattgttaatattttttttttttaagagttatgatttttaaattgttttaatagaatattagattaaggtgtcggatttatagaattaaagagtggtagtattttttaaatttatataaaattttttttatgattaggtatagtggtttatgtttgtaattttagtattttgggaggttaaggtcggaggattatttgagtttaggaatttaagattagtttgggtaatgtggtaaaattttatttttattaaaaatatagaaaattaggtggcggtgggggtgtgtatttgtagttttagtgatttaggaggtttaggtgggagaattatttgatgttaggaagtcgaggttgtagtgagtattgatggtgttattgtattttagtttgggagaaagagtgatattttattttaaaaaataaaaataaaaaatattttatattttttaaaaatgtttgtattttattattattttattagaatttaaattaagatagtatttgatttataaaaatatattaatttttagtgttttatttttatttatttaaatatatttttattatttaaaatttagaaggagtaaaagggtaataggaaacgttttatttttatttttgttttttaatatttggtttttcgttttggggataattattgttattagttttttatatatgtttttagagatataatgtgtttaattgtttaaggtttagtaaagttatattttaagaagttgtaggagagagtattaaattttaattgttattttagtaaggaaattaatattgttaaaatgtttatttaaagtaatatatagatttatttaaagtaatatatagatttaatttagtttttattaaaattttagtggtattttttatagaaatagaaaaaataataaaatttatttgtaattataaaaatttttaaatagttaaagtaatattgaaaaacgaaaagttagaggtattatattttttgatttaaaagtatattataaagttatagtaattaaa

SEQ ID NO: 409 - DNA, 7350 bp, Artificial Sequence
  chemically treated genomic DNA (Homo sapiens)
ttagattttatgtttgtttgtttattacgagatgggaggaggagaaaaagcggtacgatgtttttttgattttatcggtttttttaagggtgtcggtattttgggtggatttacggttgttgggttttacgttaaaggttaagtgagacgtaggttaagttttacgtcggggtttagatattttggggttttggtttgttagataggttgttttagagttttatttagttcggggggattgggagtagttttaagattattttatttttttttgtaaattttgtttattgtaaattaaatatagcgttttttttattttgcgggttggttgagtgttttttttggggttgtagtgtttttgtttattattttttttttgggttttgtgggttttgttgggaggggagttgtggggaggtggagggggttgggaggggtgttgggggaggtggaaggggttgggaggggtattgggggaggtggagggggttgggaggggtgttggggggaggtggagggggttgggaggggtgttggggggaagtggagggggttgggaggggtgttgggggaggtggaaggggttgggaggggtattgggggaggtggagggggttgggaggggtgttggggggaggtggagggggttgggagaggtgttgaggggaggtggggggggtgggaggtgggattgtttttggtgttatttggtggtttttttcgtgtaatatatttttattaaatgttcgttgtatattacgtatgtattgttttgagcgttaggaatagtagtaattaggacgggtagggtttagagttttttttgtgtgttaagaatatagatagtttaggtagagggtattcggtgttttagatataaagtgaaggtttagttttaaatgtggttggatttaggtatatattttgaggttttgttggtttggattgttaatttatttacgaggatttatttttaggtagttttagtttgtttttttatttgggtacgttatggttggggttttttgatgggtaaggtttttattgatcgagttttttttggattggggtagttttgtagggattagttttatagggttagtgggttttttcgtgtgcggcgacgagagagtgtagaaataaagatagaagataaagagataagagaaaaggtagttgggtttaggagattattattattaatgtatggagatcggtagtggtttcgaatgtcgggttgcgttgttatttattggatataaggtagaaggggtagggtaaagaatgtgagttatttttaatgataggtaaggttacgtgggttatgtgtttattggataggagttttttttttgtttggtagtcgaggtagagagagagaggagatagagagaaagatagtttacgttattatttttgtatattagggattattagtattgttattaatttattattgttatttagaaggtagagttaggtgtataggatggaatatgaaagtggattaggagtgtgatcgttgaagtatagtattatagggagacgtttaggtttttggataattgcgggtaagtttgattgatgttaggttttttataagaggtggaggagtagagttttttttaaatttttttggggaaagggagatttttttttttttttttcggtttgttaagtagtgggtgttgttttttgatattttttgttacggttggattacggttcgtttggtaacgggcgtttttttagacgttggcgttatcgttagattaaggaattttttggtggttttgttcgggtataatagaaggtttttatttttgttttttggttatattttattatgtttttttagtttttatttttgtatggtttggttttttttaggttatgattattgagtaaggattattataatattggaataaaaagtaattgttataaattaatgattaatgatatttatatataattatatttaagatttatatttggtataattatttttgttttatattttattatattgtaatagttcgtgtttttttttttgtttcggtgtttgggtggtttgtcgtttatatagttttatttaagttacgatgaaaaacgggtggttattttttttttataagagaaaggggtataaggttaattgatattttttgttttaaggatttttgaaatgatattgggttttttttttatttagagatatggttggttaggagattagagtaagggggtggatcgaaggtttaagtgttgagcgggaggttttaagtagggagttgggaatttggaggtttggttttcgtattagatttttgtagtttattttttttttgttttattgggtagttaggaaagaagggaagggttagtgagattttatatatatgaaatttggggttggggagaggttgtaggtttagtagtttagtatttgggtgggggtaggtatcgggtagaagttgggtatagttgttggggtgtatgcggtgggttggagtggttagttggcgatagacgaggggtggtttgttttttttggtgttttttaagttttattttttttttagagtggtgggaggagaggtggcgggtagtttaatagtttaaggttatattttgtttgttttttataggtaggataagttttttgttaaattagtttcgcgattattatcgtttggtttttcggtgagtaaggttagatttgttttttaggaagtttattgattgtaggaagaggttagttgggagggattagtaggattagagaggagttgttatagtgatagttttagtgaggaggggtggttaggattagcgggggtggggtgggggtatgagtacggagaaggggtggtttgttgtatttaggggttatagcgaattagttgggtaggagaggcgtttttggtttagggttttttatttttgttttgttatcggttttttttggtttttttgtcgttttttttttgggtttgggattgttttttatcggcggttttttttaggggggttttttttgttttcgtcgagttttgaaggtgttttttttggaagatggtttttaggttttgacgttattcgaaattttttagtgattatttttttgtagtgttacgattttatattgtttttagtaggtatatgggcgggatttttaatgtttgggtaggtagggggttttcggggtaggttagtttagtgatgagaggggttcgtttttatcgtttttcgtttttatttttattttatacgttcgtttgatttgttgagcggtcggggtttgtagcgaggtcgcgaggattgcgggcggacgtttgggggaagtttgatatttttttatttttatgttttttattttaggggcgagaacggagtcgtttagtttacggggaggcgtaggggcggggtcggtcgttatgggaattcgattttcgtttcgttcggtcgcggcgtagataaaggtcgtttttttttttcggcggtcgcggtcgcggtttttatagtttcggggttgcgtttcggttttttttttttttagttgaagttttattaattttgtataaaatttcggttcgtttcggtcgggtttagtgaaaggcgttttcgggcgggggttttcggggaggttgttcgtgttttcgttttaatttagttcgagcgaggagaggggttattttcgggttcgcgttaggtttttagtcggatgtcggtttttaatggggaaattgaggtacggggtttggttatgtaaaaggggtcggagcggttgggattgagattcgttttttcgtcgcggttcgtatgggttcggtggttagtatcgtgttggttgttttaatttggttgtcgatatataaaaattagatttgatattaaaattcggattttagtgttttaaaaaaggagtgttttgggttattgggattttgattttttatttcgttggagggggtcgtttagtcgcgaagttttttattacggttttattagggcggaggtcggtggtcggtgttttagggagtaatgtttcgtcgagtttcggtcgtttttaagtgggaataaaagtagttgtgcggtttcgagcgcggtagagacgtcgagtggggcgttgttttcgttatcgttaaggtagtttttcgcgtttgttcgttcgcggggttgattttaaggattttgtatttaaaggcggtttttcggatttgggatagttagggtgggttttttagaagaggtggtcgttaaggaggaggaaaggttttgggtagtaaaaaggattcgtttggggtcgttgtttgtgggtaggaaggtttcggggtgacgtcgttgtttttggttttgatagtttagcggtcgcgttttttttagaggggaggttagggcgagtcggggtaggaggtttggaaggttttcggggcgtatcgcggattaaggtttgtaggttttgcgtaagaaagttaggtcggttttgttttaacgtttttcggtttatttttttatttagtgtcgagtttttagaaggtgttatttatatttttgttttgaaaaatattttttatggtttatttttggttttttcgtttttgacggttttttttcgttggggagggcgtcgtcggggtagggaagttcgggtcgagtttagacgcgggcgtaagtttggagaagcgcgcggtttttaagaggtgagagtcggagggaggtgttcgttttcggcgtttttttcgggaaggggagggttggttttcgttttgttatcgttttcgaggcgtaggaagtagcgtatttgttttcgggaatttttttacgtttcggttatttagttcgggaaattcgttcgggtttttcggtttcgtttcggagtttcgtttcgttcgtcgtcgtcgtcgttttcgtcgtttttcgtttcgttcggttcgggttcggttcgggcgcgggcgcggggcgcggggttgggttcgggcggagcggcggttgtttcggatatgtcgggttttcgcgtcggtttttatcggtaggagttgaataagatcgtgtgggaggtgtcgtagcggttgtaggggttgcgttcggtgggtttcggcgtttacggtttcgtttggtaggggcggggtagaaggggtgttgggtgggggtcgggtcgggtcggagagcgcgtttttttttcgttcgcgcgaggttttcggcgtggggaggggtttcgttttgttttcgttttcgggcgttaagcggatttgaggaatgaatgggggggcgggggtggcggcgtaaagaaattttttaagtagacgtcgttatcgggagggaggggggtttttcggtttttttcgattcggattgttttttattaggtttgaggtttgggaggttatagttggcgtgagggtgggttttacgcgatcgagtttcgagttattttgatgttcgggtttttaaacgtttgagtatttatttgagatttattgagtcgggttaggtagtttttcggggtttagcggatgattttttttcgttcgggttgggggttattgtttgaaaagggaagtttcgttttcggaagttaagatttttttttttgggatggttttagatttttttttagattataaattttatttaggttttggggttagaggatttggtttggggtttaggaagacgatagagtttgggtgggggaggggggttaattgggttaaggtttttgttagattcgggtagttagggttggaggggtttagggtgaggtagttatcgggagttttaagttttagtttttatgttgattgggaggttgattatgggtataggttttgagaggtgtagttgagtttttattatggttaatgtcgtttagttgttgtttattggggggttttggtggggcgtaaaggtagaggtagttagggtagagttttgttttaggtatttgtaggttggaagtgggatttttaggtttattagatttggagtttaggagtcggtattaggggtcgggggttttagggtaggttgttttttggtgtggtttttagttttttattagaagttgtaggtgggttattttagttattatgttagtatagatttgtttttttttttgagatttgaagggtaggaagagggtttgggacggtgtgggagtggttataggggattagggtgggttatggttggattcgtcgtttgggagttgttgagaggtgttcggttttttgagtgaggtttggtttttttttttgtatttttggtttatttttttagttttattgttaaggttgcgggttaggtgttaattttttgttatttgatcgtatagatgtaattggttaaaagaatttgttgttttacgtgtagggttattttttttattattttaggagtatttttttttggttataggttgggagtatggttgttttaggtatttcgatttgcgtttatgagtattttagatttagtaggagtcgtttttgttttttttgtgtgggtatggggggtggttttagtttttatttgttttgagataggattttaagagatagaagtgggagggagagaagaagtaagtattagttagagggaataggttgtgtaaaggttttttttttagtagggttgagggtagtgggatatgggagggtgggatgagggttatttgtaaagggagggtgggtttaggaagttggtgtagggtagagggtttggatttttgggaagtggggttgggcgaagggttgttttgtgggtttagttgacgtttttagttgtatattattttttgtttcggttttgttttaaataatgatgtaataaatatttttgattaatttttttttcgtattttgaatattcggaggtattaggggtttaggggttttgaggtggttttagaatttttttttgtgagttttttgggtttatggggtttatggggtagagggaggttcgtttgttgtaggtgaatgttagtgattgtttttttgttgtgtttttttacgttggatggggtattttttttttagttttgttttgaatgggggtttttggttgagcgtgggaattagtggggttaggggatagagaaggtttaggattttgtggggtgaatatacgtatggtggtttagttttaggggtttttttttagtaagcgcggagtgggtaggttcgagggtgggaggtcgagttggggcggcggggtcggggtagaaaagttttacggttttatttttacggagaagcggcgagagggacgtcgttcgggtttacgcgcgtgcggtcgttttcggatttttttcggcgtcgttttattcgttcgttttttagt

SEQ ID NO: 410 - DNA, 7350 bp, Artificial Sequence
  chemically treated genomic DNA (Homo sapiens)
attggaaggcgggcgagtgaggcggcgtcgggaggggttcgagggcggtcgtacgcgcgtggattcgggcggcgtttttttcgtcgttttttcgtggggatggggtcgtggggtttttttgtttcggtttcgtcgttttagttcggttttttattttcgggtttatttatttcgcgtttgttgggaaggagtttttggggttggattattatgcgtgtgtttattttataaggttttggattttttttgttttttggttttattgatttttacgtttaattaggggtttttatttaaagtaaggttgggggagaggtgttttatttagcgtggaaaaatatagtaggaaaatagttattggtatttatttgtagtagacgggtttttttttgttttatagattttatgggtttaggaggtttatagagggggattttagagttattttaaagtttttggatttttggtgttttcgaatgtttaaaatacggagggaaagttggttagaggtgtttattgtattattatttggaataaaatcgggatagaaggtgatgtatagttgagggcgttagttggatttatagaatagtttttcgtttagttttattttttagaggtttagattttttattttgtattagttttttgagtttattttttttttgtaggtgatttttattttatttttttatgttttattgtttttagttttgttaaaggaaaggtttttgtatagtttgttttttttggttgatatttgtttttttttttttttttatttttgttttttgggattttgttttagagtaagtggaggttgaggttattttttatgtttatataaggggagtaggagcggtttttgttgggtttgggatgtttatgggcgtaggtcgaggtgtttggggtagttatgtttttagtttatgattagggaaaggtgtttttgaggtggtgaggggagtggttttgtacgtggggtagtaagtttttttggttaattgtatttgtgcggttaggtgatagggaattggtatttggttcgtagttttggtagtggaattaagaaaatgggttaggggtgtaaggggggagattaggttttatttagagaatcggatattttttagtaatttttagacggcgagtttagttatgatttattttagttttttatggttatttttatatcgttttagattttttttttgttttttaggttttaaagaggaagatagatttgtgttggtatgatggttagaatgatttatttatagtttttgatggaaggttagggattatattagaagatagtttgttttgggattttcggtttttgatgtcggtttttgagttttaaatttggtgggtttagaggttttatttttaatttgtaagtgtttggggtagagttttgttttggttgtttttgtttttgcgttttattaggattttttagtgggtagtagttaagcggtattggttatggtgaggatttagttgtattttttaaagtttgtatttatgattagttttttagttaatatggaggttgaaatttaggattttcggtaattattttattttaagtttttttagttttggttattcgggtttaatagagattttggtttagttgattttttttttttatttagattttgtcgtttttttgggttttaggttaggttttttggttttagggtttaagtggggtttgtggtttgagggggagtttgaggttattttagggggagagattttggttttcgggagcggggtttttttttttagataatagtttttagttcgggcgggggagggttattcgttagatttcggggggttgtttgattcgatttagtgaattttaggtgggtgtttagacgtttaggggttcggatattagggtggttcggggttcggtcgcgtgagatttatttttacgttagttgtgattttttaggttttaggtttggtggggagtagttcgaatcgggagaggtcggaggatttttttttttttcggtaacggcgtttgtttggaaagtttttttacgtcgttattttcgtttttttatttattttttagattcgtttggcgttcgggggcggaggtagggcgaggtttttttttacgtcgagaatttcgcgcgggcgaggaggggacgcgtttttcggttcggttcggtttttatttagtattttttttgtttcgtttttattagacggagtcgtaggcgtcggagtttatcgggcgtagtttttgtagtcgttgcggtattttttatacggttttgtttagtttttgtcggtagaagtcggcgcgagggttcgatatgttcggagtagtcgtcgtttcgttcgggtttagtttcgcgtttcgcgttcgcgttcgagtcgagttcgagtcgagcggagcggagggcggcggaggcggcggcggcggcgggcggggcggggtttcggggcggggtcgggaggttcgggcggatttttcgggttgggtggtcggggcgtgggggggttttcggagataaatgcgttgttttttgcgtttcggaggcggtggtagagcggaaattagttttttttttttcggggggggcgtcgagggcggatattttttttcggtttttattttttgggggtcgcgcgtttttttagatttgcgttcgcgtttgggttcggttcgggtttttttatttcggcggcgttttttttaacgagggagaatcgttaaaagcgaagaagttaggggtaaattatgggaagtattttttaagatagaaatatgaatagtattttttaaagattcggtattggataggaaaataagtcgaaaggcgttgggatagggtcggtttggtttttttgcgtaggatttgtaggttttggttcgcggtgcgtttcgggaattttttaggttttttgtttcggttcgttttgattttttttttgagagaggcgcgatcgttggattgttaggattagggatagcggcgttatttcggggtttttttatttataagtagcggttttaaacggattttttttgttgtttagaatttttttttttttttagcggttattttttttaggaagtttattttgattattttaggttcgaggagtcgtttttgggtgtagggtttttgaagttagtttcgcgggcgggtaggcgcggggggttgttttggcggtgacgggggtagcgttttattcggcgtttttgtcgcgttcggggtcgtatagttatttttatttttatttgaaagcgatcggggttcggcggagtattgttttttggaatatcggttatcgattttcgttttggtagagtcgtggtgggaggtttcgcggttgggcgattttttttagcgaagtgagaaattaggattttagtggtttaaaatattttttttttaaaatattaaaattcgagttttaatgttaaatttgatttttatatatcggtaattaaattaaaatagttagtacggtgttggttatcggatttatgcggatcgcggcgaaggaacgggttttagttttagtcgtttcggttttttttgtatgattaagtttcgtgttttagtttttttattggaagtcggtattcggttgggggtttggcgcgggttcggggatggttttttttttcgttcgggttgggttggggcgaggatacgggtagttttttcgagggttttcgttcgggagcgttttttattgggttcggtcgaggcgggtcgaggttttgtgtagagttaatggagttttagttaaaggaggaggaggtcggagcgtagtttcggagttgtgggaatcgcggtcgcggtcgtcgggggaggggagcggtttttgtttgcgtcgcggtcgggcggggcgggagtcgggtttttatggcgatcggtttcgtttttgcgttttttcgtggattgggcggtttcgttttcgtttttagggtgggggatatggaggtggggaggtgttaggttttttttaggcgttcgttcgtaattttcgcggtttcgttgtaggtttcggtcgtttagtaggttaggcgggcgtgtggggtgggggtgggggcggggggcggtggaaacgggttttttttattattgagttgatttgtttcgggaattttttgtttgtttaggtattagaggtttcgtttatgtgtttattggggatagtgtggggtcgtggtattgtaagggagtgattattgaggagtttcgggtggcgttagggtttggaggttattttttaggagaggtatttttagagttcggcgggggtaagggaagtttttttggagggagtcgtcggtggaggatagttttaggtttagaggggaagcggtaggggagttaggaagggtcggtggtagggtaggagtgagaagttttgggttagaggcgttttttttatttagttgattcgttgtggtttttgaatatagtaggttatttttttttcgtgtttatgtttttattttattttcgttggttttggttatttttttttattggagttgttattgtgatagtttttttttggttttgttggttttttttagttggtttttttttgtagttagtgaattttttaaaaggtaaatttggttttgtttatcgggagattaggcgatggtggtcgcggagttgatttagtaggggatttgttttgtttgtaagaagtaagtaggatgtagttttgggttgttaagttattcgttatttttttttttattattttgggaggaaaatgggatttggaaagtattaggaaggataggttatttttcgtttgtcgttagttgattattttagtttatcgtatgtattttagtagttatgtttagtttttattcggtgtttgtttttatttagatgttggattgttgggtttgtagtttttttttagttttaagttttatgtgtgtggggttttattgatttttttttttttttttgattgtttagtgggatagggaagaggtggattgtaggggtttagtacggaagttaggtttttaggtttttagttttttatttgagatttttcgtttagtatttaagttttcggtttatttttttgttttgattttttgattagttatgtttttgggtaaggggggaatttaatgttattttagggatttttggagtaggggatgttagttggttttgtattttttttttttgtgggggagagatggttattcgttttttatcgtggtttgaatggagttgtgtgggcggtaagttatttaggtatcgaggtaagagagaggatacgagttgttgtagtataataaaatataaaataagaatagttatattagatatagattttagatatgattatatatgaatattattaattattagtttgtagtaattattttttattttaatattataataatttttgtttaataattatagtttaggaaaaattaggttatatagagataggagttgaggggatatagtgaggtgtgattagaagataagagtgggagttttttgttatgttcggatagggttattagagggttttttggtttagcggtgacgttagcgtttgggaagacgttcgttattaggcgggtcgtggtttagtcgtagtaaaaggtgttaaggaataatatttattatttagtagatcgggaaagaggggggggggtttttttttttttaggggagtttagagaagattttgtttttttattttttgtggagggtttgatattagttaggtttgttcgtagttatttagaggtttaaacgtttttttgtgatgttgtgttttagcggttatatttttagtttatttttatgttttattttgtatatttggttttgttttttagatagtagtagtaaattagtgataatattaatagtttttgatatgtagaaataatggcgtaagttgtttttttttttgttttttttttttttttgtttcggttgttaggtagggaagggatttttgtttagtggatatatgatttacgtgattttatttattattggagatgatttatattttttattttgttttttttgttttgtatttaataaataatagcgtagttcgatattcggggttattatcggtttttatgtattggtagtagtggttttttgggtttagttgtttttttttttatttttttgttttttgtttttatttttatattttttcgtcgtcgtatacggagagatttattgattttgtggggttggtttttatagagttgttttagtttaaaggggattcgattaatggaggttttgtttattaagagattttagttatgacgtgtttaggtggggagataggttggggttgtttgagaatggattttcgtgagtgggttagtagtttagattagtagaattttaggatgtgtgtttggatttagttatatttgaagttgggtttttattttgtgtttggagtatcgaatgttttttgtttgggttgtttgtatttttggtatataggggaggttttgagttttgttcgttttggttgttgttgtttttagcgtttaggatagtgtatgcgtggtgtgtagcgggtatttggtaagaatgtgttgtacgaaagaagttattagatggtattagaagtagttttattttttattttttttatttttttttagtattttttttagttttttttatttttttttagtattttttttagttttttttattttttttagtattttttttagttttttttattttttttagtattttttttagttttttttatttttttttagtattttttttagttttttttatttttttttagtattttttttagttttttttattttttttagtattttttttagttttttttattttttttagtattttttttagttttttttatttttttatagttttttttttagtaggatttatagagtttagggaaggggtggtggataggggtattgtagttttaggaggaatatttagttaattcgtagagtgaaaaagacgttgtatttgatttataatgaataagatttataaaaaggggtggggtggttttggaattgtttttagttttttcggattgggtggggttttagggtagtttgtttgatagattaggattttaggatgtttgggtttcgacgtaggatttgatttacgttttatttgatttttgacgtggggtttagtagtcgtgagtttatttagagtgtcggtatttttggggaggtcggtgaggttaggaaggtatcgtatcgtttttttttttttttttatttcgtggtggatagatagatataggatttgg

SEQ ID NO: 411 - DNA, 12669 bp, Artificial Sequence
  chemically treated genomic DNA (Homo sapiens)
taatataatttattttagtgttaaagtagttatagataatatatagatgaatgaatgtggttgtgtattaataaagtattatttataaaaataggtagtagtttagttttggtttagatttattttagataatgaaataattagcgaataaaatagttaaaaatttttgtttatgtgattttatatgttagaggaaggagaaaataaagataataaattaataagttgtattgtataatagaaggttgtaagtgttatggaggggaaatagaatagaatgagggggatagggagtgataatagggtgatagtagtgattggaatttaaatagtgtagttagggggtttcgtgagtaagtgacgttttaataagatttgtgagttttgtagatatttgaaggatgaggttttaggtaaaaggaagagtaagtatagaggtattgagatagtagtatatttggtatttttgaaaaattataaggaggataatgtaattagaggagaatgaaagaggggtagagaaataagagacgaggttaaagtggtaattagggtgtaggaaatatagtgttttgtaagtttttgatgattttgggtttgattttttttttttttttttttttttttttttttttttttttttttttttttttttttttttttttttttttttttttttttttttttttttttttttttttttttttttgagatagtttttttttgtcgtttaggttggagtgtagtggtatgattttagtttattgtaatttatgttttttaggtttaagtaatttttttgttttagtttttggagtagttggaattataggtatgtattattatgtttagttaatttttgtatttttagtagagataaggttttgttatgttggttaggttggtttcgaatttttggcgtttagtgatttatttatttcggttttttaaagtggtggaattatagtcgtgagttattacgttcggttttttttttgtattttgtatgatgaaagggataaggtagatttttggggttttttttataagagtattagttttattatttaaaggttatattttttaatattattatattggtgattcgtttttaatttatgagttttagggaggatataaatatttagattatagcgatgattttataataatgtgtatgtggggattattgataagaagagtttataagtaagtaagataaattattaaagtagaaatatttgaggaaaagagttataagagatatggtataatataaatatggattattttataatttttaaaagtaggaataatagttattattttttttttgttagtaaaaagagaattaagaataattgatatatacgatttttttatttgtgtttgattcgttgttttagtattatatattttgatttaaaagttattgtattaaaagagatagatttatgggattgattataggttaataattatattgatatttataaagagttacgtagtaaggtttgagaagtttatgtggataaatttatatatattttttatttttgttgttatagtttttttatttgttgaaataagtatagggatagttggggaaaaggttaatagaagtttttttgtttaattgttttttaaaagtttttttagaagtggttgtttttggtgaatatttaaaagggagtttaatatgtatattttgtttattcgaagtggtttaagtatattatttttttagattttattattagttttttgatattattttttttaattttttgaatattagttgtattgttagttattggttttgtataagttattgaaggaggggattttggatttttttggggtttatggttaggaagtaagtgattaggttgtataagatgaatttattttaatatttttgattttttaagtatttttgatttttttatttgtattatttggtattatatttatatttagtgtgagttgttattgagttgatattatagtaaattaattgggtaaattggtttagcgtttttattgttagaggtagtatattaattttttttttttttttttttttttttttgttttgttgttaggttggagtgtagtggtacgattttggtttattgtaatttcgattttttggtttaagcgatttttttgttttagttttttaagtagttgggattataggtatatgttattacgtttagttaatttttgtatttttagtagagacgtggttttattatgttggttaggatggttttaattttttgattttatgattcgtttatttcggttttttaaagtgttgggattataagtatgagttatcgcgtttagttttaatttttagttttttttacgttatttttagatttattgttatgtttattttttgttttttgttgtttttttgttgtgtaaagtattatttttttattagattttgtttatatttttttggggcgtattagtatttgattttagttttaggagtgaaggtataggtagagataggatatttggagaattagtatttttttgtagggtgattgttttatgttttttaatgtaggttgtattagttttattagataatggtgggaagtttgtggagatatagtagaatttaggagggtagtggtatttggatttatttaaatttatttaaatttttagggttttttttttttataattaatgtttttagtgtttatagaagagatttgatgaggttgtaaatgaaaatttttgttgtaattttaggttgggcgcggtggattacgtttgtaattttagtattttggaaggtcgaggtgggggaattatttgaggttaggagttttaaattaggttggttaatatggtgaaattttttttttattaaaaatataaaaattagttaggtgcggtggtatacgtttgtaattttagttatttggtaggttgaggtagggaaattgtttgagttcgggagttagaggttgtagtgagttaagattgtgttattgtattttagtttcggtaatatagtaagattttgttttaaaataattatattgtaattttggtgtttgtagtattaagttttgtagttgagagtttagatagtagggaattgggttttttagggagtttaatatgtttatattttatttattttaagaggtttatttatattatattatttttttggattttattattaattttttgatattattttttttaaatttttttttagtagagaaggtagatttttatattatttttgaggttttttgaaataggagggttttttggtatagttataaaagcgtgtgttttttgattatgtttaagtttgttattttttattttttaagtttttttgggtagtttaggggtttaaaaagttagaaaaatttgtttttgttattgttattgttgttgttatagttattttatatttataaagttgataaatggatatatagtattgttagagtttttttgttatttggaaatgttataaaaagatggttttgttttatgtttattttttaaatttttcgttagtgttttatatataggggatttaagttatgtttaggattagagttataaggaaagtgtagattttagttgttgatattttgtaatgtggggttgttgggggatggagaagggaggttggagaggatgtttgtttaggtgtaattttttttttttttttttgaattggagttttattttgttatttaggttggagtgtagtggtatgattttagtttattataatttttgttttttaggtttaagtaattttttttgttttagtttttggagtagttgggattataggtgtttgttattacgtttagttaatttttgtgttttttagtagagacggggttttgttatgttggttaggttggttttgaatttttgattttaggtgattcgttcgttttagttttttaaatttttgggattataggtatgagttatcgcgtcggtttaggtataatatttaatgtatatttgaggtttgtttttggattattttttttttttattttagttaagatattgagagtataaatttttggttataattttaatttcgttgtttattatttgtgttaatttaaattttttgtgttttaatatttattagttattgtgttaatgaattttggaattttgtgtgattttgggagtgtgtcgtagtttattaggtgagtagaatttttataaatcgaggattattggtgttggattatggtaggaagttttttggggtattgtaggaagtaggtgtttttatttagtagtaggattggtttataggtgtttttatagcggttggtaagtgtttgtttatgaatgaatggatgggtgggagcggagtgaaggagattacgtttttaggtttttgatttttaggtttgtaaaggtgagggggtcgcggtgtggtaagagggaaagagtgttttggtgtttataggtttcgatttgaattgaattttggttttgttatttacgagcggtaggatttttgggtgagtttatttatttagttttttttattgtagaatggagttggtaagatttatttttttaattttattttaaatatttgtgttgagagtaagtggaatttttgattcgagaatttagtgcggttagcggattaggttagcggagaattttaggagtttcgggggcgggggatgggggtgtagggttttggtcgtgtaggggtagtacgtgggtgttaagttcgtttgtcggtgttaagttcgttcgtcggtgttaagttcgttcgttagtgtttttcgcgcgtattttggatttagcgttaatttattttaatttcgtagtagacgagggtttgtgcgagagggggtcgggcggttgtagggaaggcggagtttaaggggaaaacgaaattgagaattagttttttcgaagtcgcgggttttcggtcggcggcggcggcggcggcggcggcggcgtaggtgagtagggtagggggtagtcgagggagcgcggggagcgggggtcggggggttacgtacgaggggttgtaggtttagtcggggcgggattcgttaattttgcgtttttagtttaggacgcggacgttgattcgaagtttttggtttcggttgggttagtattgggagagtaggtttaggttcgtagttcgggtgtggggttttttttaaatttagggaaaggatcgtggagcggggtggggattgaaagttatttttttttcgtgaagaatttttattagtgtaagtaataaatattttttaggtagtagttgtggggcggggtttagtggaagacgaataggtttagtggtttgatatatggaaaatacggaggtttgaaatatttatagattggttgaataatttttggttaaaaatttttttcgtggagagttgtagtagttttttaattgtttggtcgtagtttttgtttttatttcgtatttttatttttgaatttttattttttattttttttttatattttagtatttggaatgtttttttaagtaagaattagatttttttttgtttcgatttttttcgtagtttttttgttttattagaattttataaatatttattaaggtttataggtaaggtttttcgtattttttatttcggttacgttggtttttttgttgtttttggtgtatagttaagtattttttagtttttaggtttttgtattgtttgttttttttttttggaaagttttttttttagataattgtatggggaaattttttttttattttgtattgttttttatgttagtttattagagtagttttttttaaataatttgtttatataagaaatttcgttttgtttttgttgtttttttttttattatttcggttgttaatatagtagttattatttggtgatattttttttttttttttttttttttttttttttttgagatagatttttattttgtcgttaggttggaatgtagtggtacgatttgggtttattgtaatttttgttttttaggtttaagcgattttttttttttagttttttaggtagttgggattataggtgttcgttagtatagttaattaatttttttatttttagtagagatagggttttatcgtgttggttaggttgtatgtagtttgttggaaaggaagtggaggtatagttaaaataatttttgggtattagtaagatggataaatattattttttagtgattatgatggaggttttttttagatgagtgaataagatgtagaatttgttttttaaagagtttattaattagtttaaaaagtagttagggttgtgttgaaggttgggtaaggtggagtggtaagtttatattagttgattttttagtattaaagaaggttgtgttgattttgatagatgagtggatattggtgggtatagagagaatgtagatattgtattataaatgtagagaaaagtaggtgataagttttggatggggtatttggagatattttggtatttatttatttattattgagtttggttttttatttgtagtaatttatgttttattttggaaaatagttaaataagtaattttaataaaggggatgagtattgtggaagagtttgtgaaggagtgtttgggattttgagttgaaatttgtaggaagtagaaattgattaggttaagatagtagaaggaatagagttaagggtattttaggagggagtaggttggatagaggtagttgggagtttaggagagagtttatggtggaagcgtgtttttgagaattattattgtgttcgtggaatttaaagttataaatttggaggtgattattaggggagtgagtttaagtagaaaagagtaagtttaaggatcgggtttagtgatgttagaatatttagaaaagaggaagttagaattatagaaaaggttaaaaaaaaaaaaatagaagaaaagaagttgaagatgaattaggaaaggagatagaaaaggagtagtttgttagaatagaagaaaattaggtttaggtgttatggtttatgtttgtaatcgtagtattttgggaggttaaggtgggtggattatttgaggttaggagtttgagattagtttggttaatatggggaaatttcgtttttattaaaaatataaaaaattagtcgggcgtggtggtgggcgtttgtaattttagttattcggaatgttgaggtaggagaatcgtttgaattcgggaggtagaggttgtagcgagtcgagatgttattattatattttagtttgggtaataagagcgaaattttgttttaaaagaagaaaattaggagagtgggtgttttaaaagtttaagttaagatagggagaggagggcgaagaggatgcgtaattttattaaatgttggttgtaagttaagtagagaaggattaagaattgattattggatttagtgatagggaagttattggtaatttcgataaaaataattttagtggtttgtggagattgtatgattgaattgatgtttttttgtttgtttgttttgtttttgtttttttttttgagacggagtttcgtttttgttgtttaggttggagtgtaatggtacgattttagtttatcgtaatttttattttttgggtttaagcgattttttttttttagtatttcgagtagttgggattataggtatgtgttattatttcggttaattttgtatttttagtagagatggggtttttttatgttggttaggttggttttgaagtttcgattttaggtgatttgttcgttttggttttttaaagtgttgggattataggtgtgagttatcgcgtttggttattgaattgatgttttaaaaagattatgatgtggttgtattaaaaaagaaaatagataataataagtgatggtgaggatgtggagaaattagaattttcgtgtattgttggtggaaatgtaatatgggtgtaattattgtggaaaataatttggtgatttattataaagttaaatagaattattatgtgatttaattttatttatatattataaatatttagaagtagggatttaaatagatatatgtatattagtgtttatagtagtatgatttaagatggttaaaaggttgaaataattagtgtttatttataaatgaatgtatgaataaaatatggtatatatatataacggaatattatttagttttaaaaaggaaaggaattttgatatatgttataatatagatgaattttgaagatattttgttaagtgaaataattagatataaaaggataaatattgtttgattttatttatatgaggtatttagaataggtaaatttatagagatagaagagagattagaaaatataaaaaattaattaggtatgtttacgtttatggttttagttattcgggaggttgaggtgggaggatcgtttgagtttagagtttaaggttgtagtaagttgtgattatattattgtattttagtttgggtaatagagcgagattttgttttaaaaaaaaaaaaaaaaaaaaagattagtagagattgaaaggattgggaaatggggagttattgtttaatgggtatatattttttgtttggaaagattaagagttgtggatgtggatgtggtggcggttatataatattgtgaatgtatttaaaggtagggaattaatatattgaaaaatagtatattttatgttatgtgtattttattataattttaaaatataaaaaaaaaaattataatggttgtagggtagagaaggaattgaagtagttgtcggaattggttttgagatttttatagtaatttaggaatgaggtggtgttggtttgaattaggatggtaagtgtagatatttttgagaagtagaaagattttggtgataggatttagttatagattagaaggtagggagaggaaatgttaaggatgttttttagattgatggtttttagatttggatagatggtggatttattttttgtgaaaggaaattttaaattagtttgggagaagattatatatgtagtataggatattttgagtttaaagttcgtttaagatgtttaagtggagaatttggatagagagatttgaaatttagagcggtttataaggaatatgtaaattttagaggtaatggcgtatagatgattattgaaattatggacgtgaaagaaattattttaaggagaaagtatagagtgaagagaagaggattgttgggttatgttagtatttagagttataaagattaaggtgtgttaaaaagagtggttcggttaggcgtggtggtttatatttgtaattttagtattttgggaggttgaggttggtggattattggagtttaggagttggagattagtttggttaatatcgggaaattttaaaaatataaaaattagttgggcgtggtggtgggtatttgtagttttatagttttagttatttgagaggttgtggtaggaaaattgtttgaatttgggaggtagatgttgtagtgagttgagattatgttattgtattttagtttgggtaatagagtgaggttttgttttaaaaataaaaaatagaaagagtggttttggaagaaagaagattaaaagagttttttaagaagaattaagaggtttataggatttgatttttgtttttatggatttatcgattttggaagttttatataaatgggaattatataatatgtgtgaaattttatgtttggattttttattttgtataatgtttttgaggtttatttatgtttttgttgttgtggttgttgttttttgagatggagttttcgttttgtcgcgtaggttggagtgtagtggcgcgattttagtttattgtaagtttcgtttgtcgggtttacgttatttttttgttttagtttcgcgagtagttgggattataggcgcgcgttatcgcgttcggttaattttttgtatttttagtggagacgaggttttatcgtggtttcgattttttgatttcgtgattcgttcgtttcggttttttagagtgttgggagtataggtatgagttacggcgtttggtttatttatgttgtagtatgtattagtattttattttttttgtgattgaataatatttcgttgtgtagatatattttatattttgtttattatttattcgttgatggatatttggtttgtttttattttttggttattgttaatagtgttgttatgtatatttttgtttaagtttttgtttggaaatttgttttttaattttttgaaatatttaggaatggaattgttgagttttatgataatttaaagtttattttttagaggaattttagtaatcgtattgttttatatttttattagtagtgtttgaggggtttagtttttttatgtttttattaatatttattttttattattttttgattattattattattgttatattagtgggtgtgaaattgtatttagttgtggttttgaattttatttttttaatgatttatgatgttgagtatttttttatgtgtttattggcgatttatatattttttttggagagatgtttgtttaagtttttttgtttatttttttaattgggtggtttgtttttttgttgttgagttgtaagaattttttatatatttggttattagatttttattagatatatgatttgtaaatattttattttgtagattgttattttattttttttatagtgttttttgatatataaacgttttaaattttgatgaagtttaatttatttttgtttttttttgttgtttgtgtttttgttgttatagttaaaattttattattaaatttaaagttatgaagattttttttatatttttttttaagagttttatagttttcgtttgtatatttatattttatattttttaaattttgtttataatttaaattattgttatagatttggtttagtgagatttataaatagaggttttaatttatttagtggttaaattgttttaaaattgatttttgtaaaatttagaggggagatttttgggattttatagagaaatttatatttatatagttaaattttttatgattttatatattttatttttttaaagtattaaaatttttttatttgaagaatacgtggggagaagagaaatatattttagtatttagatatgtagattatttttaaaatagtttattatttaattagttatttttgtgtaaattagttttttttgaagtaagtattgtgttgttttcggttataagcggtttttattttgtatggtattgtgggattataaaaatggttatgtaaagtaattttaataattaatggggaaaatgatgattgttttatgatttttaaaattttgttaaaatattaaaatttttaaggttagttataaatgtagaaaaaaatgtaaaaaaaatttaaaaatatttagtatattgtaatttaaaatattaaaaatagaattaaagtgttttattttattgtgaaaattaagtagtttgaatagggattgttttttttttttgttaagtgatttatgatattgagtaagtattttttttatttatggtaaattgttatattttttttaagtttgggtgagtttttagttttttattgtttgtgtttttaatgttgtgaagtatttttgtatttatattaaatgttttttagtgtgaagtttgttttttttttttttttatcgttattttttttgggatatatttatttttattgtaattattttttttatttgtgttgataagtttgtttttattaagtttttatgaatgtatagtaggaagaatatttttatgattagtgattttttttataaatttatttatgtttgatttaaattttatttttagtgttattatttttcgttgttttgttggatttttatttttgttggttagttttttcgattgtttatttttataaaatgttaggtggaggataaagagatagtgtaattacgtgttttgttgtgagtgaattgattaatagatgtatagggattaattattggaagaatttgaaataagtaatacgattggttattgattatgaagtatatttgttatttatatcgtgatttgtagattgaagaattagtagagaagtttgtattttttgtaattatttagagttatattgtgttatttaaaattttaatttaggtttaaataatattagtttttttattagtttttttttttttttggtaaggaaattggtatttaaattaaatttaggttattgaaatttgtgttatgggaatcgtgtatattgaggatttgtttatattttatatgtttatattggtttaggtaggtttaatgttgattattgagaaataggttatttgaatttatattaaatagtgaattttaaagtatttaagatgaaaaattcgtgtatattgaggtgtttttaaaatttttgttatttgataattaagtttaaaatgtattttagagtaatcgaattttagaaataaagatttttaaaggttttatagtttgatattatagattatttagtatgtttataatgaattatttttttttttttaattttagt

SEQ ID NO: 412 - DNA, 12669 bp, Artificial Sequence
  chemically treated genomic DNA (Homo sapiens)
attgaaattgaaggaggagaaataatttattataaatatgttggataatttgtggtattaaattatggggtttttaaaggtttttatttttaaaattcggttattttaagatatattttaagtttgattgttaaatgataaagattttaaaagtattttaatgtgtacgaattttttattttgggtgttttaagatttattatttgatataaatttagatagtttattttttagtagttagtattaagtttgtttggattaatataaatatgtagggtgtaggtaggtttttaatgtgtacggtttttatggtataaattttagtgatttagatttagtttaaatattagtttttttattaggaaggaaaggaaattggtaaggaaattggtgttgtttaaatttaggttaaaattttaggtagtatagtataattttgagtaattataggaagtataaatttttttgttagttttttagtttataaattacgatgtaaataatagatatgttttatgattagtgattagtcgtgttatttgttttaaatttttttagtggttggtttttgtgtatttgttaattagtttatttatagtagagtacgtagttatattgtttttttgttttttatttgatattttatagaagtgaataatcgaaagaattggttaataaagatgaaagtttaataaagtaacgaaaaatgataatattggaagtgaaatttgaattaaatataaatggatttgtagaagaagttattgattatgggaatgttttttttgttgtgtatttataggagtttagtgaaggtaaatttattaatataaataagaaaagtgattgtaataaagataaatatgttttagaggaagtgacggtaaaaaaaaaaaaaaaataaattttatattaaagagtatttaatgtgaatatagaaatattttataatattgaaagtataagtaataaaaggttggaagtttatttaaatttaaaaggagtatgatagtttgttatgaatagaaaagatgtttatttagtattataagttatttggtagaaaaaaaaggtaatttttatttaaattatttagtttttataatgaaataaaatattttaattttatttttaatgttttaaattatagtgtattaaatatttttaaattttttttgtatttttttttatatttataattgattttaagagttttaatattttagtagaattttaaaggttatggaataattattattttttttattgattattaagattgttttgtatggttatttttatggttttatagtattatgtaaaatgaggatcgtttgtagtcgggaataatataatgtttgttttagggaaaattgatttatatagaagtgattagttgagtggtaaattattttggaaataatttatatatttaagtgttgaaatatattttttttttttttacgtattttttaaataaaaaagttttaatattttaaaaaagtgaagtgtatgaaattatgaaggatttaattgtatggatatagatttttttatgaaattttaaaaattttttttttgaattttgtagaaattaattttaggataatttaattattgagtaaattaagatttttgtttataggttttattggattaagtttatagtaatgatttaaattataaataaaatttagaggatataaaatataaatgtataagcgaaaattataaaatttttagaagaaaatatgggggagatttttatgattttggatttggtgataaaattttagttatgatagtaagagtataagtaataaaagaaaatagagataaattgggttttattaaaatttaaaacgtttgtgtattaaaggatattatgaagaaaataaaatgataatttatagaatagaatatttataaattatatatttgatgagggtttagtaattagatatataaagaatttttatagtttaataataaaaagataaattatttaattaaaaaaataggtaaaggggtttgaatagatatttttttaaagaaaatatgtaaatcgttaataagtatatgaaaagatatttaatattatgagttattaaagaaatggaatttaaaattataattaaatataattttatatttattagtatggtaataataataataattaggaaataataaaaaataagtgttggtgaggatatggagaaattggattttttaaatattgttgataagaatgtaaaataatacggttgttggggtttttttagaaggtaaattttgaattattataaaatttagtaattttatttttagatattttaaagaattggaaaataggtttttaaataaagatttagataggaatgtatatagtagtattgttaataatagttaaaaggtggaaataaattaagtgtttattaacggataaatggtgaataaaatgtgaaatatatttatatagcggaatattatttagttataaaaaaaatgaagtattgatatatgttataatatggataggttaggcgtcgtggtttatgtttgtatttttaatattttgggaggtcgaggcgggcggattacgaggttaggagatcgagattacggtgaaatttcgtttttattaaaaatataaaaaattagtcgggcgcggtggcgcgcgtttgtagttttagttattcgcgaggttgaggtaggagaatggcgtgaattcggtaggcggagtttgtagtgagttgagatcgcgttattgtattttagtttgcgcgatagagcgaagattttattttaaaaaataataattataataataaaaatatggataaattttaaaaatattatgtaaaatgaaaaatttagatataaaattttatatatattgtatgatttttatttatatgaaatttttagaatcggtaaatttataaaggtagaaattagattttgtaaattttttaattttttttggaaagtttttttgatttttttttttttagggttattttttttgttttttgtttttgagatagggttttattttgttgtttaggttggagtgtagtaatatgattttagtttattgtagtatttgttttttaggtttaagtaatttttttgttatagttttttaagtagttgggattatgggattataggtgtttattattacgtttagttaatttttgtatttttgaggtttttcggtgttggttaggttggtttttaatttttgaattttagtgatttattagttttagttttttaaagtgttgggattataggtgtgggttattacgtttggtcgggttattttttttaatatattttaatttttgtagttttaaatgttggtatggtttaataatttttttttttttattttatattttttttttaaggtgattttttttacgtttatgattttagtgattatttatacgttattatttttaaagtttatatattttttatgaatcgttttgagttttagatttttttatttaaattttttatttgaatattttgaacgaattttaaatttaaaatattttgtattgtatgtatgatttttttttaagttggtttgaagtttttttttataggaaatgagtttattatttatttaagtttgaaagttattaatttgggaggtatttttgatattttttttttttgttttttaatttataattaagttttgttattaaaatttttttattttttaaagatgtttatatttattattttagtttaagttaatattattttatttttggattgttgtgagaattttagaattagtttcgatagttattttaattttttttttattttgtaattattgtgatttttttttttatgttttaaaattgtgataaaatatatataatatgaaatgtattattttttaatgtattaattttttgtttttaagtatatttataatgttgtgtagtcgttattatatttatatttataatttttaatttttttaaatagaaagtgtgtatttattaaatagtaattttttattttttagtttttttagtttttgttaatttttttttttttttttttttttgagatagggtttcgttttgttgtttaggttggagtgtagtggtgtgattatagtttattgtagttttgaattttgggtttaagcgatttttttattttagtttttcgagtagttgggattataggcgtgggtatgtttggttaattttttatattttttaattttttttttgtttttgtaaatttgtttgttttaggtattttatataagtggaattaaatagtatttgtttttttgtgtttggttattttatttagtaaaatgtttttaaggtttatttatgttgtagtatatgttagaattttttttttttttaaggttgaataatatttcgttgtgtatatatattatattttgtttatgtatttatttatgaatggatattggttattttaattttttggttattttgaattatgttgttgtgaatattggtatatatatatttgtttaagtttttatttttgaatatttgtggtatataagtggaattgaattatatgataattttgtttaattttgtgatgaattattaaattgttttttatagtggttatatttatgttatatttttattagtaatgtacgagggttttaatttttttatatttttattattatttgttattatttgtttttttttttaatatagttatattatgatttttttaaaatattaatttagtggttaggcgcggtggtttatatttgtaattttagtattttgggaggttaaggcgggtagattatttgaggtcgggattttaagattagtttgattaatatggagaaattttatttttattaaaaatataaaattagtcggggtggtggtatatgtttgtaattttagttattcgggatgttgaggaaggagaatcgtttgaatttaggaggtggaggttgcggtgagttgagatcgtgttattgtattttagtttgggtaataagagcgaaatttcgttttaaaaaaaaaaataaaaataaaataaataaataaaaaaatattaatttaattatgtagtttttataagttattgaaattgtttttgtcgaggttattaatggtttttttattattaaatttagtagttagtttttagtttttttttatttgatttataattagtatttgatggggttgcgtatttttttcgtttttttttttttgttttagtttggatttttaagatatttatttttttagttttttttttttgagatagagtttcgtttttgttgtttaggttggagtgtgatggtggtatttcggttcgttgtaatttttgtttttcgggtttaagcgatttttttgttttagtatttcgagtagttgggattataggcgtttattattacgttcggttaattttttatatttttagtagagacggggtttttttatgttggttaggttggttttaaatttttgattttaggtgatttatttattttggttttttaaagtgttgcgattataggtatgagttatggtatttgggtttggtttttttttgttttgataagttattttttttttgtttttttttttggtttatttttaatttttttttttttatttttttttttttaattttttttatggttttaatttttttttttttagatattttagtattattgggttcggtttttagatttgtttttttttatttggatttatttttttggtgattatttttaggtttgtggttttaaattttacggatataatgatggtttttaaaagtacgtttttattatggatttttttttgaatttttaattgtttttgtttaatttgtttttttttaaaatgtttttgattttattttttttgttgttttggtttggttaatttttattttttatagattttagtttaaaattttagatatttttttataggtttttttatagtgtttattttttttattaaaattgtttatttaattattttttaaaatagagtatgaattattataggtaagggattaggtttaataatgaatgagtgagtattaaaatatttttagatattttatttaggatttgttatttgtttttttttatatttatagtgtaatatttgtattttttttgtatttattaatatttatttatttattaggattaatatagttttttttgatgttggagggttagttagtatgggtttgttattttattttgtttaatttttaatatagttttgattgttttttaaattaattagtgagttttttggggagtagattttatattttatttatttatttggaagaaatttttattataattattaaaaaataatatttgtttattttattaatgtttagaaattattttggttatgtttttattttttttttagtagattatatatagtttggttaatacggtgaaattttgtttttattaaaaataaaaaaattagttggttgtgttggcgggtatttgtagttttagttatttgggaggttgaggaaggaaaatcgtttgaatttgagaggtagaggttgtagtgagtttagatcgtgttattgtattttagtttggcgatagagtgagaatttgttttaaaaaaaaaaaaaaagaaaagaaaagaaagaaaatgttattaggtgataattattatgttgataatcgaagtagtggaagggggaatagtaagggtagagcggggttttttgtataggtaggttgtttgaggaaggttgttttgataagttggtatgggaagtagtgtaggataagggagggatttttttatgtagttatttggggaagaagttttttagaaagaagaaataagtagtgtaaaggtttagaggttggaggatgtttggttgtgtattaggaatagtaaggaagttagcgtggtcggagtagggggtgcgaggggttttgtttgtgagttttaataaatgtttataggattttgatgagataggaaagttacggggaaggtcggagtaggggagagtttggtttttatttaaaggaatattttagatgttgaggtgtggagaagaggtagggggtggaggtttaggggtgaggatacggagtgggaataggaattgcggttaggtaattgggaaattattgtaattttttacggaagagatttttagttaaagattgtttagttagtttatgagtattttaggttttcgtattttttatgtgttaagttattaggtttattcgttttttattagatttcgttttataattgttgtttgggaaatatttgttatttgtattgataaaaattttttacgggaaggaaatggtttttagtttttatttcgttttacgattttttttttggatttggggagggttttatattcgggttgcggatttgggtttgtttttttagtgttgatttagtcggggttaggggtttcggattagcgttcgcgttttgagttggggacgtaggattggcgagtttcgtttcggttgggtttgtagtttttcgtacgtggtttttcggttttcgtttttcgcgttttttcggttgttttttgttttgtttatttgcgtcgtcgtcgtcgtcgtcgtcgtcgtcggtcggagattcgcggtttcgggagagttggtttttagtttcgttttttttttggatttcgttttttttgtagtcgttcggttttttttcgtataagttttcgtttgttacgggattggggtaaattggcgttggatttagagtgcgcgcgagaggtattggcgggcgggtttggtatcggcgggcgggtttggtatcggtaggcgggtttggtatttacgtgttgtttttgtacggttaggattttgtatttttatttttcgttttcggggtttttagggtttttcgttggtttagttcgttggtcgtattaggttttcgaattaagggttttatttatttttaatataaatatttggggtggggttgggaagatggattttattagttttattttataatagaggaaattgagtaaatgaatttatttaggggttttgtcgttcgtaagtggtaaagttaggatttagtttaagtcggggtttgtaaatattaaagtatttttttttttttgttatatcgcggtttttttatttttataagtttggggattagaggtttgggggcgtaattttttttatttcgtttttatttatttatttatttatgagtagatatttgttagtcgttgtaaaagtatttgtgggttagttttgttgttaaatagagatatttgttttttatagtattttagggagttttttattatagtttaatattagtagttttcgatttatagaaattttatttatttgatggattgcgatatatttttagagttatatagagttttagagtttattggtatagtgattaatgagtattgaggtatagagaatttggattaatataggtagtaagtagcggagttagaattataattaggagtttgtatttttagtattttagttgggataagagaggaaggtggtttaaagatagattttaaatatatattaaatattatgtttaggtcggcgcggtggtttatgtttgtaattttagaaatttgggaggttgagacgggcggattatttgaggttaggagtttaggattagtttggttaatatggtaaaatttcgtttttattaaaaaatataaaaattagttgggcgtggtggtaggtatttgtaattttagttattttagaggttgaggtagggagaattgtttgaatttgggaggtagagattgtagtgagttgagattatgttattatattttagtttgggtgatagagtgggattttaatttaaaaaaaaaaaaaaaaaattatatttaggtaggtattttttttagttttttttttttattttttaataattttatattgtagggtattaataattaaaatttatattttttttgtagttttggttttgggtatagtttaagttttttatatgtaaagtattggcgggaggtttagaaggtagatatgaggtagagttatttttttgtggtatttttaggtgataagaaaattttgatagtgttgtgtgtttatttgttagttttgtgggtgtgggatggttgtggtagtagtaatggtagtagtaaggataagtttttttgattttttgagtttttgaattgtttaagagagtttaaagaatgaaaaatggtaagtttaagtatgattagaggatatacgtttttatgattgtattagaaaatttttttattttagggagttttaggggtgatgtaaaaatttgttttttttgttggggaaagatttggaaggaatgatattagagggttggtgatgaggtttaggggaatgatatgatatgggtgaattttttggaatgggtaaagtgtgagtatattggattttttgaggagtttaattttttattgtttgggtttttagttgtaaagtttggtgttgtaggtattagaattataatataattgttttgagatagagttttgttgtgttgtcgaggttggagtgtagtggtataattttggtttattataatttttggttttcgggtttaagtaatttttttgttttagtttgttaagtaattgggattataggcgtgtgttatcgtatttagttaatttttgtatttttagtagagaaggggttttattatattggttagtttggtttggaatttttaattttaagtgatttttttatttcggttttttaaagtattgagattataggcgtgatttatcgcgtttagtttagaattataataaaaatttttatttgtagttttattaggttttttttgtgaatattgagggtattgattgtgaaagaaagaagttttgggaatttgggtggatttgaatgaatttaagtgttattgtttttttaaattttgttgtgtttttataggttttttattattgtttgataaggttggtatagtttatattaaaaagtatgaaatagttattttgtaaggaggtgttgattttttaaatattttatttttatttgtgtttttatttttagaattagaattagatgttaatgcgttttaagaggatatggataagatttgatggaggggtgatgttttatataataaaagagtaatagaaagtaagaaatagatatggtaatgagtttaaagatgacgtgaagaaagttgaaagttgaggttgagcgcggtggtttatgtttgtaattttagtattttgggaggtcgaggtgggcggattatgaggttaggagattgagattattttggttaatatggtgaaattacgtttttattaaaaatataaaaattagttgggcgtggtggtatgtgtttgtaattttagttatttgggaggttgaggtaggagaatcgtttgaattagggagtcggggttgtaatgagttaagatcgtgttattgtattttagtttggtaatagagtaagaaaaaaaaaaaaaaaagaaagaaagttgatgtattgtttttagtagtgggagcgttaagttagtttgtttagttggtttattataatattagtttagtggtagtttatattaaatgtaaatgtaatgttaagtaatgtagatgaagaaattaaaaatatttagggagttaggaatattggagtagatttattttatgtaatttagttatttattttttaattatggattttaagaagatttaaagtttttttttttagtggtttatatagagttagtggttggtaatgtagttgatgtttagagagttggaaggaatgatattagagggttgatgatgaggtttagggaaatgatgtgtttgaattatttcgaatgggtagagtgtgtatattgggtttttttttgaatgtttattaaaggtaattatttttaaagaggtttttgagaagtagttgagtaagaagatttttgttagttttttttttagttatttttgtgtttgttttaataaataaagaggttgtgatagtaggaatggaggatatgtgtgagtttatttatatgggttttttaggttttattacgtaattttttgtgaatattagtatggttattgatttatagttaattttataagtttattttttttaatatagtgatttttagattaaaatgtgtaatgttaaagtaacgaattagatatagatagaagaatcgtatgtattaattatttttaattttttttttattagtagaggaaaaataataattgttatttttgtttttggaaattgtagagtggtttatatttatgttgtattatattttttgtggtttttttttttagatgtttttgttttagtaatttgttttgtttatttataaattttttttgttaatagtttttatatgtatattattataaaattatcgttatggtttgaatgtttgtgttttttttaaaatttataagttaaaagcgaattattaatgtgatggtattaggaggtgtggtttttgggtggtggaattggtgtttttataaaagaggttttagagatttgttttgttttttttattatgtagaatatagaaagaaggtcgggcgtggtggtttacggttgtaattttattattttgggaggtcgaggtgggtggattattggacgttaggagttcgagattagtttagttaatatggtaaaattttgtttttattgaaaatataaaaattagttgggtatggtggtgtatgtttatagttttagttattttagaggttgaggtaggagaattgtttgaatttgggaggtataggttgtagtgagttgagattatgttattgtattttagtttgggcgatagagagagattgttttaaaaaaaaaaaaaaaaaaaaagaaagaaagagaaagaaaagaaagaaagaaagaaagaaagaaagaaagaaagaaagaaagaaagaaagaaagaaagaaagaaaaaagttaagtttagaattattaagggtttataagatattatattttttgtattttggttgttattttaatttcgttttttgtttttttgttttttttttatttttttttagttatattgttttttttgtggttttttaagaatgttaggtatattattgttttagtgtttttgtatttgtttttttttttgtttggaattttattttttagatatttgtaaaatttatagattttgttgaaacgttatttgtttacgaagttttttgattatattatttaagttttaattattattgttattttgttgttattttttattttttttattttattttattttttttttatggtatttatagttttttattatataatataatttattgatttattgtttttgtttttttttttttttgatatgtaaagttatatggatagggatttttgattgttttattcgttaattattttattgtttagaatagatttgggttaaaattgggttgttgtttgtttttgtaaataatgttttattagtgtataattatatttatttatttatatattgtttatggttgttttgatattaagatgagttgtgttg

SEQ ID NO: 413 - DNA, 5241 bp, Artificial Sequence
  chemically treated genomic DNA (Homo sapiens)
cgtcgttttgttagtttgagttttaggtggagttttaggtggttttttttttttcgggggaaggcggttttggattagtaggcgggtttgttgtattttcgttttggggttgtagggaagttggtcgttgtgggcggtttcgggttagtttcgttttatttgttttttttttggagattattagtttagggtttgtttttgtagtgttattggtttggtaggtaggatcgaggaggaagtggttgattattgagcggtttttttttatttggtttgggttattgtgtatagttgtgtcgttggtttagtttcgttttttgcggttttttgtcgtggtttttttttttttatagagagatgttgtttcgtgggtaagtttcgggtattatcggggttttagttttttgttagttttggagggagggagggttttgttgatgtttatttcgacgtgtgtgaacgtgagtgcgatttgtcgttgttttgcgtttgttttcggtttttatgaatttttttttttcgtaaggtgtgaggattttcggtttatttatgtttttttgttttttttttaatatttttttttggataagtgtgtatttgttttttttattgtatttttatttttagtttttgggtttttgtttttgttttttgtttaggatttgtttttttgggtagtttataatattttaaatatagtagttagaggttattcgcgaaggtttttttacgtttagttaattttttcgtattttttaatattagattttggttttattttttttgtttttttttattttttttttttttgtattatttatttaataggtacgtgttgagtatttattatgtattaggtgttgtttaagatgttggtaatattggagtgaataagatagatatggtttttgtttttacggagtttatattttagtgggaggttatagatcgaataaataatttaataaattggattattgtagatttttagaagtattacgtagaaaatagatagttttggtcgggtgtagtggtttatatttgtgattttagtattgtgggaggttgaggcgagaggattgtttgagtttaggagtttgagattagtttggttaatatagtgagattttgtttttataaaaaataagaaattagttgggtgtggtggtatacgttttgtggttttagttatggagaggttaaggtgagaggtttgtttgagtttgggaggttaaggttgtagttagcgatgattgtattattgtatattagtttgggcgatagagtgagattttgttttaaaaaaaaaaaaaaaaaaagaaaatgaattagttttatatgttagtaagtgattgggtgtgtaggtgatattattagttggagggattagggaggttttttcgaggaggtgatatttgagttgagattcggatgaggaggaagaggagttggttatgtgacgtagtgattaagagttaagtatttttgggtagaggagatggtgagtataaagttttaatgtgggaataaataaaaaaaggatagtgtgttcgtggtagaggattttagtggagcggaggtagggttatagtaggttagattatgttggagttaggatgttgaaagtgaaaatttgacgagatgaggtggcgtacgtttgtgattttagtattttgggaggtcgaagggggaagattgtttgagtttaggagtttaaaattagtttgggtaatatagagagattttatttttattaaaaaaaaatattgggtatgatggtttaagtatgtggtagttttagtagtttgggaggttgaggtgggaggattatttgagtttaagagtttaagattattttgggtaatatagggagagattttatttttattacgattacgattattattattattaataaatagttggatgtagtggtatgtatttgtggttttagttatttggaaggttgaggtaggaggattatttgagttaaggaggtcgacgttgtagtgagttggattgtgatattgtattttagtttgggtgataaagtaagattttgtgttaaaaaaaaaaaaaaaagagagggaaggaaagaaggaagggaaggaagaaagaaaaagagaaagaaggaaaaaaaggaaagagcgagaaagaagaaagaaaaggaaggaaggaaagaaagaaaagaaaggaaagaaaaagaaaaagtgatatttagtcgaaagaagaaaggaaagaaaaagaaaaagtgataatcggtcgaaagaaaaaagaaaaagtgataatcggttgggtatggtggtttaagtttgtaattttagtattttgggaggtcgaggtaggtggattacgaggttaggagtttaagattagtttggttaatatggtgaaattttgttttaattaaagatataaaaaaaaaattaggttggtatagtggtgcgtatttgtgagttttagttattagggaggttgaggtaggagaattgtttgaatttaggaggcggaggttgtagtgagtcgagattgcgttattgtattttagtttgagtgtagcgggagagattttattttaaaaaaaaaaaaaaaagaaaagaaaaagtgataatttgtttatagagtattggcgagtttgtgggtgggtggttttttagttttgttgatttttgttttttatatttatgtttgtttttgttttagtgtatattttgttattgtcggttttatcgatggggtttttattgagttttttggtttttgatttcgtttgtggttatttttttgttaggtagtttggttaggttttttttggtgtagattttatttttggttttttagtttggttttgaatgattttttatagtagggtttttattttttagaataattttgttttagttatatggtttgtttacggttaggtattgtttatgtggattttgtgcgtgttatttttttgttttgatttatgttgtttttgggggagtatttttttttttattttttattatgggttgtggtagtgtttattttatttgttttcgacgttgtttgttgtagtatggttgttgggggaaagggtattaggtttcggcgtttgatagtcgtgttttatttatttttttatttattagtttgtgattttgggtaattatttaatatttttgagttttagtttttgtttttaaaattgggtgaataatatttattaagtagggttggtttgaggattaatagtataatgtaaaagttggtagtattgaaattttgttatttattagttttttatattagtatttgggaaatattgttaagtttatttgttaggcggggattttgaggtttagagtagttttagaattttttatagattattttgttttgtttgcgtttttagattgtttatttttttgtattattattgattttgatttgtatggtttttaatttttttttttttgagacggagttttattttgttgtttaggttggagtgcggtggtatgatttcggtttattgtaatttttattttttgagaagttgggattataggtatgtgttattatattcggttaatttttgtatttttagtagagttggggttttattatgttggttaggttggtttcgattttttgatttcgtgattcgttagttttggttttttaaagtgttgggattataggcgtgagttattgcgttcggttaattttacgtttatatatatttatgtaaatagtatttagatagagataaagagttttttttgtattttaaaagttttttagaaattgtttttagttagtatatttatttttataaaggtaatgtatgtttattatataatatttaaaaaggtatgtagagaattaagtgttttttttagttttgttttttagttatttagtttttttttttaggggaagttattaatatgtgttttttatgtattttttgttgagttgttttttttcgttttggtttggcggtgttgatgtttgtatttggaattataggtaggtagtattatatattttagtgtttagggtttttaagattaattagttttgagaaaattagttatggtgaggattttgttttttagttttttaggagataggttttttggtgggagtgttggggtagggtagaggtttagggataagaattagaaaggatttatgttgatagggttgtttagggttatgttgtttatttttttgttatagtggtatggataaattgtatatgttggttagaggagggtattttttttttttgtaagtattggtaaggttttaattattagttttttgtttttatggtagtttttttggataaggaggtttttaatttttgttttttgaagttttgagggttggtgtataggagtttaaagtattggttttggaatcggattgtttgggtttgaattttggtattgtagttgatttattgatggatttaggtaatgttttaaattttttgagttttaggttttttgtttgtaaaatgataaagatagtttttgttttatagggttgtggtgagaaattaattagataaggtatgtgaacgttattatagtatagcgttcggtatttagtaggatttattcgatgatagttgttatcgttattattgttattagcgtgggttagggagggttgcgtaaaagtagttggtggaggagggagagatgtcgtgggatcgtttgggttcgtatgcgtgaagtattatttgggtttggagtgtgtaaggtatatatgtgtttttattgtatgtgttgttatatatgtgtaatgttatgtttttgagtttttgattgtagacgtgtgggaagtgggtttcgtttttatttttagtgttattttgttttgtttttttttttttgttgtgttttaaaacgagaagtataagtgagtttttttaaggggtcggtcgcgtttttttttgttttcgttttgtcggttgttttaggttagtggagtggtagttttagaattgggattatcgggggtggtgaggcggttcggtattgggagttgtatttgaggtttagtttttgagttttttgtttgtttagattagttgtatttttttattttttgcgtttttttttttttcggaagtttttaggatggtgaggtaagggtttgttatttacggtagataggaggtaagggtgtttggtgtttacgggatttttttttattgttttgtttgggtcgtttagg

SEQ ID NO: 414 - DNA, 5241 bp, Artificial Sequence
  chemically treated genomic DNA (Homo sapiens)
tttgggcggtttaggtagggtagtgaggaggggtttcgtgggtattaggtatttttgttttttgtttatcgtgggtggtaggtttttattttattattttgggggttttcggagaggaagggggcgtagggaatgaggaggtgtagttagtttgggtaggtagagagtttagggattaagttttagatgtagtttttagtgtcgggtcgttttattattttcggtggttttagttttggggttgttattttattggtttggggtagtcggtagggcggggataggaagaggcgcggtcgattttttgggggaatttatttgtatttttcgttttagagtatagtaagggaagagaagtagagtagggtggtattgggggtggggacggggtttattttttatacgtttgtaattaaaggtttaggagtatggtattgtatatatgtgataatatatgtagtaaggatatatgtgtgttttgtatattttaggtttagataatattttacgtatgcgaatttagacggttttacggtattttttttttttttattagttgtttttacgtagttttttttggtttacgttaataataatgatggcggtgataattgttatcgagtgagttttgttggatgtcgggcgttgtgttataatggcgtttatatgttttgtttgattggttttttattatagttttatgaaataggggttatttttattattttatagataaggaatttgaggtttagggagtttaaggtattgtttgagtttattagtgagttagttgtagtgttaggatttaaatttagatagttcggttttaaagttagtgttttgaatttttatatattagtttttagggttttaaagaatagagattaagagtttttttgtttaaaggggttgttatgggagtaggagattaatagttaagattttgttaatgtttgtaagagagaagggtgtttttttttaattaatatatgtagtttgtttatgttattgtggtagagggatggataatatgattttgagtagttttgttaatatgggttttttttaatttttgtttttaggtttttgttttgttttagtatttttattagggggtttattttttggggggttgggggataaggtttttattatggttgatttttttagggttggttgattttagaggttttaaatattaaggtatatgatgttgtttatttgtaattttaaatataaatattaatatcgttaaattaaaacgaggaaaagtagtttaataggggatatataagaaatatatattggtggttttttttagggagggaaattgggtggttggaggatagggttgggggagatatttggttttttatatatttttttgaatgttatatgatgggtatgtattatttttataaaaataaatatgttaattgggaataatttttgggaaatttttagggtatagggaaggttttttgtttttatttggatgttgtttgtatgggtgtgtataaacgtgaagttggtcgggcgtagtggtttacgtttgtaattttagtattttgggaggttaaggttggcggattacgaggttaggagatcgagattagtttggttaatatagtgaaattttaattttattaaaaatataaagattagtcgggtgtggtggtatatgtttgtaattttagttttttaggaggtggaggttgtagtgagtcgagattatgttatcgtattttagtttgggtaatagagtgaaatttcgttttaaaaaaaaaaaaattaaaaattatatagattaagattaatggtgatataagaagataggtagtttggaagcgtaaataaggtaaaataatttgtagaaagttttggaattgttttgagttttagaattttcgtttgataaatgagtttaataatattttttaaatattgatgtgaaaagttggtaagtggtagggttttagtgttgttagtttttatattatattattaatttttaggttaattttatttagtaggtgttatttatttaattttagaaatagaaattaagatttagagatgttaagtaattgtttaaggttataagttagtgagtaggaaggtgggtaaaatacggttgttagacgtcggagtttggtgtttttttttttaataattatattgtagtagatagcgtcgggggtagatgggatgggtattgttatagtttatgatggaaggtggaggaagaagtgtttttttagaggtaatatgggttagggtaaagaggtggtacgtatagagtttatatgggtagtgtttggtcgtgagtaagttatgtggttggagtaaagttgttttgagaggtggggattttgttgtagagggttatttaaggttaggttgagaaattaaggatgaaatttgtattaggggaggtttggttaagttatttggtaggaaaatgattatagacgggattagggattagaagatttagtaggaattttatcggtggggtcgatagtgataagatgtgtattggggtaggggtagatatgagtgtgagaagtaagaattagtagggttagggagttatttatttataaattcgttagtattttgtaagtaggttgttattttttttttttttttttttttttttttgagatggagtttttttcgttgtatttaggttggagtgtagtgacgtaatttcggtttattgtaattttcgttttttgggtttaagtaatttttttgttttagtttttttagtagttgggatttataggtgcgtattattgtgttagtttaattttttttttgtatttttagttgagatagggttttattatgttggttaggttggttttgaatttttgatttcgtgatttatttgtttcggttttttaaagtgttgggattataggtttgagttattatgtttagtcggttgttatttttttttttttttttcgatcggttgttattttttttttttttttttttttttttttcgattgggtgttatttttttttttttttttttttttttttttttttttttttttttttttttttttttttttttcgttttttttttttttttttttttttttttttttttttttttttttttttttttttttttttttttttttttttttttttttttgatatagaattttgttttattatttaggttgaagtgtagtgttataatttaatttattgtagcgtcgatttttttggtttaggtgatttttttgttttagttttttaagtaattgagattataggtgtatgttattatatttagttatttattagtagtagtagtagtcgtagtcgtagtagagatgaggtttttttttatgttgtttagggtggttttgaatttttgggtttaagtgatttttttattttagttttttaaattgttaggattattatatgtttgggttattatatttagtatttttttttaatagagatggggtttttttatgttgtttaggttggttttaaatttttgagtttaagtaatttttttttttcggttttttaaagtgttgggattatagacgtgcgttattttatttcgttaggtttttatttttaatattttagttttaatatggtttaatttgttgtggttttgttttcgttttattagggttttttgttacgggtatattgttttttttttgtttgtttttatattagggttttgtgtttattattttttttgtttagagatgtttgatttttgattattacgttatatggttagtttttttttttttttattcgggttttagtttaaatgttattttttcgggaaggtttttttgatttttttagttagtaatgttatttgtatatttagttatttgttagtatatgaagttggtttattttttttttttttttttttttttgagataaggttttattttgtcgtttaggttggtgtgtagtggtgtaattatcgttgattgtagttttgattttttaggtttaagtaagttttttattttagtttttttatagttggaattataggacgtgtgttattatatttagttaattttttattttttgtagagatagggttttattatattggttaggttggttttaaatttttgggtttaagtaattttttcgttttagttttttatagtgttgggattataggtgtgaattattatattcggttaaggttgtttattttttgcgtaatatttttgagaatttgtaatgatttaatttattgggttatttgttcggtttgtaattttttattggaatgtaagtttcgtgagagtagagattatgtttgttttgtttattttagtattattagtattttaaatagtatttggtgtataatagatgtttaatacgtatttgttgaatgaatgatgtaggggaaagggaagtgaaaggaaataaagaagatgggattaaagtttgatgttgggaagtgcggagaagttggttggacgtgggagggttttcgcgggtggtttttgattgttatgtttgaggtgttgtgagttatttagggggataggttttaagtaggaggtagaagtaggagtttagaggttggaagtagaaatgtaatggagagaatagatatatatttgtttaggggaaaatgttaaagagggggtagaggagtatgagtgagtcgggggtttttatattttgcgggaaggggaagtttatagggatcggaaataggcgtagggtagcggtagatcgtatttacgtttatatacgtcggagtgagtattaataaagttttttttttttttaaaattaataggagattgggatttcgatggtgttcgggatttatttacgggatagtatttttttgtagggagggggaagttacggtagagggtcgtagggggcggggttgagttagcggtatagttgtgtatagtggtttaagttaggtgaggaagaatcgtttagtaattagttatttttttttcgattttgtttgttaggttaatggtattgtagggataaattttggattaatagtttttaggaaaaggataggtggggcggggttggttcgagatcgtttatagcggttagtttttttgtagttttaaagcgggagtatagtaggttcgtttgttggtttagggtcgttttttttcgggagaggaggagttatttggagttttatttggagtttaagttgatagagcggcg

SEQ ID NO: 415 - DNA, 5523 bp, Artificial Sequence
  chemically treated genomic DNA (Homo sapiens)
tttaaaagtagttttttagaggtcgttagagtatgatgggtgttggttttttttggttgtgtagttatggatttttttttgtttaggggggttgggtatggtagaggagggggtttgtttattttggggtttggatgtgattgtgggttttttggaggagggacgtggggtgggtatattgatggaggttttttcgttttcgtatagtggatatttggttcgtgggttgtattatggttgagttgttttagggtaaggtttttttttcgggaagcgattgtatttttggtttaggttggggagtagggttaaatagggttttttttgtagggtagggattagcgttggttttttttggcgggttttgttttttttgttttttatgttatgttattttgggttggttatttttatttataggagagcgggttttgggtagcgttttaaagttttgggtttgggggtttaggaggggtttgtggttggttcgtgggtgttttttgagtgatatagatattgattagttgaagcgtattatggaagtggtgggtatatttagttttgaggttttggtaaaaatttttttagaatacgtgagttggtgttcgttagttagtagtttttttttttggttgagtttttaggttttttgggggagagggtggtgtggaaatgcggggattatatggggaatatgggatgtggtgggatagagtttagggtaggtgtttaatttttgtaggggaaataggagaagggggaagatatttttgatattagggatagtgagtgtaaagttatgattttagtaagtagtgtttggttagggtagtgggggtgggttgggggtttagtaagtagtgtttggttagggtagtgggggtgggttgggggattttagtaagtagtgtttggttagggtagtgggggtgggttgggtggagggagtgtatttggatttagtttttgtaggtattaggggttaattgaggagttagaattattagattttatatggagggggttattggtttgtttgtgtttttgttttggtttgttggagtgaatgagtttgggggtttgttaagagaagttttagtttggggttagggaggtagagagtgagtagtttttttaggtgtttttgtgtgtttttaggttcggatatatatttagtttttgttttttatgttttagaaggatttgagtagtatttttcgtggagttaattttttgggtgaggattgttttgggttagattgggttttatatttggttttggatgtatagttgatttttttttttattattggtttttttgtagttatagatttttttggaaggatgttggtgttggatagtgattagagggttagtgtagttgaggtattggtttacgtttattttagttagtattacgatttcgaggatgagttagaggtcgagttatatgatgagagcgttgaggttaaggagcgtacgttggaggagtggaagggtgagtatggtagtggttgggggtgggtttaggggtttgcgggttttatttttttagaggtaggaaatgttttagtttttttttagattggttaggtgtggaagggcgtttaggtgtttagtataggttgggagcggggcggaggagtgatatagggtaggttttggtttttagattgtgttgaggttgttgttatagggtggtgggtttgggttgggtggtaggtgttagataagtaggtgaggggtcgggttgtgggaggtataagtttattttttttttttattttttagagtttatttattaggaagtttttagttttaagtttttagagttatcgaagttatttggtagtttggagattgagtagtgaggtgttgtttagtagtttttgagagtttgtggaggggtttgggtttgtatttttttatagttggtttggttttttcgagaggtattttttatatttttatggttatagatttttggtttaggatttttcgtttttaggagaatttatacgtatgtatgtatgtataaatatgtgtgtatatgtgtttgttatgtgtaggagtttgggtataagtgtttttgggtttattttggtttttttgtttttttttggttattgtattttttattgggatttgattgtggggttttagatgttaaaggggtttttttgcggagtttttttgtttgttttaggtcgatttaagggagtgttagttttgggtttttttttgttttagggttttttggaggacgcgttggggtcgggatttcgggagatttaaagggagaggttttagtggttagagttgtttagtttggaggtagggggttgttttggttattgttgagatttataggtttaagaggagaggtagagttagtgtgttattaggttgggtagggataattattaggtgttaaatgagaaaagttgtttggagttttgtgtttattcgtgggtgtgtgtgggtacgtgtggatgagcgtgtatttttcgtgtttatatgttagggtatatgtgatgtggtgcgtgtgaatttgtgggcgtttaaggttagtagttatatttggtaagaagttggagtcggggtgggtgtgttgttgtttttttttttttcggtttttgatgttttgaggggtgttttagattggcggttttagtgggttaaagggtaattatatgagtatgggtaggggttttttttttggatgtgggatttatagtagttttttgaggttgggggtgggtgggtgggtggtttggttttgaggacgttagggtaggtagtatatttggatgtggatttggattcggatatttttgttttgtattttggttcgttttttatttttgtttatcgttgtggttttgtagtcggagatttgaggtgttttggtttgtgggttagttttttttttttgttttaggatggagttgatttagtaatttcggagacgggattttgtttagagttgagttgggggtgtggttttgttttggaaagggggtgattttttgtttcgaggggtttagggaagtttgggtgttaagtgtttgtattaggggtgtataataaagggggtttttttttatttggtttgtatttaaaggttattttaggttcgggtgtttttattatttttgttgttgggcgtggggggagtgtttgggttattttgtattatttatttttagttggttagattttttaggtttttagttagattagcggttattttttggtattttttttgttttttggagggtttgagagtttagggggattaggggaagatatggttgatgggtagattttgagggtatagggtgtgatagttatttagatggtgattttagttgttttgtggggatgtattgggtaggtttggttttgggttaagatttagatattattttcgtttattttttagtgtttagggaagttggttggggagaagttgggtgttttaaggagtaagggtttgtttatttttgggtgggggttgggtagggtagggaaaatagttttttttttttttttggtgaaggaaaaagaggttattttaatttagggaatgtgtacgttggtttcgtttttattacgcgttgtagtttatgtgtgggggagggtttaggttatttggggttaggtagtgtttttaaggattagggatagtttgtgtttttgtttgggttttgggtaggggtggaaatcgtttgggagttgggggttttttggggtttggttagtgtagtggttaatttcgggggaagtttagtgttggcggttgggggtgggaggagaatggtgatatagttttattttagaagtttggttcgtgtagggtttgttggatttttgagttttattacggggagtaagggggatagcgtggaagttgggttttttggaagaggtggatggagtgttataggtagtttagggtataaagggtatgggttataggtagttgtggtttgggtggttttgggttgtttcgtttattggttacgagttggtgaatgtcgtggagtacggtttaagtttaggtgtaaagttattattatttttgagcggttgagttgttgatttatggtaggagggcggggtagaaggttttagggattttgttatttattagtttagtgggtttttggggtgttttaatattttttttgagatttaggtttttgggttggtgaaggggtgttagggtggggttttgtttttaggagtatttggtttaggatggggttagatttatgggaggataatgtttatatagaggggttaggcggagggttttagtaggtttttatttttgttggagagagtgtagttatttttagtttgggttttgtaggataggataggtaggggtgggatgggtagagatattagtatttgtaatgtttggagtaggtattttatagatggggggagtagggggaggagttgggggtttaaaagggtttacggggatttatgggattgagaggttcggggttagtggttataggagtggggttggggatgtagtttgaggagtttgggggatagattttttcgtgtagaaagagggatataggtaggataggtgtagatggattttttgttgggggacggatggattaggtttagtggtagggtatttttgggggtggtttgcgaagttgatttcgggaatatagggtttagttcgatttgcggttgttatagaagttagcgtttaggttgttaaggatgggttttgcgttttggagtcgtggggagttaggattggagcgggcggggggggggggggggggtttttgttgagatttttttagggcggggaagtttagttaaaggggagaggttggtagaggtattttcgcgtcgcgttcggttttttatggggacgaagttgcggggcggcgtttttttttttttgcgtttttttttaggtttcggttttttttaggtttcggttttttttcggcggcggtcgtttcgggttttcggaggggtcggagggcgggcgagggcgttacgtgcgcgtcgttcgcgggtcggttggttttcgggcgggggaggggtcgtgcgtagtttgggtcggggtcgggtcggggtcggtatttgggatatttttgagggaagggtcgggagcgggagcgttttagcggtcggcgggcgggcgggcgagcggacgagcggcgcggagtcggttcgaggcgcgcgtcgagggagtttcgttttcggtcgtgggggtatcgttcgtaggttttgcggggtgggtagttttcgggtttgttatgagtttttcgtcgttcgttcgtagtggtttttatcgttaggaggtgattaagacggtttgggaggtgcgcgtcgtgtatcgggatttgtagttcgtgggttcgggcgtttacggcgcggtgtggtgagcgcgggtcgggcggggcggtcggcggggcgggcggggtttgcgcggggtgttcggttttttcgttaagcggttcgtttcgtagt

SEQ ID NO: 416 - DNA, 5523 bp, Artificial Sequence
  chemically treated genomic DNA (Homo sapiens)
gttgcggggcggatcgtttagcgggaaggtcgggtatttcgcgtaggtttcgttcgtttcgtcggtcgtttcgttcggttcgcgtttattatatcgcgtcgtaggcgttcgagtttacgggttgtaggtttcggtatacggcgcgtattttttaggtcgttttggttattttttggcggtaaaagttattgcgggcgggcggcggagagtttatggtaggttcgggagttgtttatttcgtagagtttgcgggcggtgtttttacgatcggggacggggttttttcggcgcgcgtttcgggtcggtttcgcgtcgttcgttcgttcgttcgttcgttcgtcggtcgttggggcgttttcgttttcggttttttttttagggatgttttaggtgtcgatttcggttcgatttcgatttaggttgcgtacggtttttttttcgttcggggattaatcggttcgcgggcggcgcgtacgtgacgttttcgttcgtttttcggttttttcggaaattcgaggcggtcgtcgtcgggggagggtcggagtttggggagggtcggagtttggggggaagcgtagggggaggggagcgtcgtttcgtagtttcgtttttataaagggtcggacgcggcgcggagatatttttgttagttttttttttttggttgaattttttcgttttgggggggttttagtaggagtttttttttttttttttcgttcgttttagttttaattttttacggttttagggcgtagggtttatttttgatagtttgagcgttgatttttatggtagtcgtaagtcgggttgagttttgtgttttcggggttaatttcgtaggttatttttaaggatgttttattattgagtttgatttattcgttttttaataaggggtttatttgtatttgttttgtttgtatttttttttttatacggaggggtttgttttttaaattttttaggttgtatttttaattttatttttgtggttattgatttcgggttttttagttttataggttttcgtgggtttttttggatttttagtttttttttttgttttttttatttgtggggtgtttgttttaagtattgtaagtattggtgtttttgtttattttatttttgtttgttttgttttgtaaaatttaggttgagagtggttgtattttttttagtagggatggggatttgttggggtttttcgtttgatttttttgtgtgggtattgtttttttataggtttggttttattttggattagatgtttttgagggtaaagttttattttgatatttttttattagtttaggaatttggattttagaagggatgttggggtattttaggagtttattgggttggtgggtaataggatttttagggttttttgtttcgtttttttgttatgaattagtagtttagtcgtttaagggtggtagtagttttatatttgggtttgggtcgtgttttacggtatttattagttcgtgattagtgagcggggtagtttagggttatttaaattatagttgtttgtggtttatattttttgtgttttgggttgtttgtggtattttatttattttttttaggaagtttagtttttacgttgttttttttatttttcgtggtggggtttaggggtttagtaggttttgtacggattaggtttttgaggtggggttgtgttattattttttttttatttttaatcgttaatattggatttttttcgggattgattattatattgattaggttttaggaggtttttaatttttagacggtttttatttttatttaagatttaagtaagggtatagattgtttttggtttttagagatattgtttgattttaaatggtttggatttttttttatatataagttgtagcgcgtagtgggaacgggattagcgtgtatattttttgggttaaagtggttttttttttttttattaggagggaaaggaaagttattttttttattttgtttagtttttatttagggatgggtagatttttgttttttgagatatttaatttttttttagttagtttttttgaatattgaggggtaggcgggggtggtgtttggattttggtttaaagttaagtttgtttagtatatttttatagggtagttggggttattatttgggtggttgttatattttgtgtttttaaagtttgtttattagttatgtttttttttggtttttttgggtttttagattttttagggagtagggagggtgttagaagatggtcgttggtttgattgggggtttgagggatttggttagttggaggtgagtgatgtaggatgatttagatattttttttacgtttagtagtagggatggtgggggtattcgggtttggagtagtttttggatataagttaagtgagagagaattttttttattgtgtatttttggtgtaggtatttgatatttaggtttttttgggtttttcgaggtaagaggttattttttttttagggtagagttatatttttaatttagttttgggtagggtttcgttttcgaggttattggattagttttattttgggataaggaaagaggattgatttatagattagagtattttagattttcggttgtagggttataacggtgggtagaggtagagagcgggttagggtgtagggtagaagtgttcgagtttaagtttatatttaggtgtgttgtttgttttagcgtttttaaggttaaattatttatttatttatttttagttttaggaagttgttgtgggttttatatttaaggagaaagtttttgtttatgtttatgtggttgttttttggtttattggagtcgttagtttgaaatattttttaaggtattaggaatcgaggagagggaaggtaatagtatatttatttcggttttagttttttgttagatatggttgttggttttgggcgtttatagatttatacgtattatattatatgtgttttgatatatgaatacggggagtgtacgtttatttatacgtgtttatatatatttacgggtgaatataagattttaggtagttttttttatttgatatttggtggttgtttttgtttagtttggtggtatattggttttgtttttttttttagatttgtgggttttagtagtgattaagatagttttttatttttaggttgagtagttttaattattgagatttttttttttgagtttttcggggtttcggttttagcgcgttttttagaaagttttgggatagaagagagtttaaggttgatatttttttgggtcggtttgggatagataggggaatttcgtaggggaatttttttggtatttaggattttatagttaggttttagtggagagtgtagtagttagaagaggataggaggattaaggtaggtttagggatatttgtgtttagatttttatatatggtaagtatatgtatatatatgtttgtgtatgtatatatgcgtgtagatttttttgaaggcgaggggttttaggttagaagtttgtgattataggagtgtgggaggtgtttttcgaggaaattaggttagttgtggaagggtgtaggtttaagtttttttataggtttttaggggttgttgggtagtattttattgtttaatttttaggttgttaggtggtttcggtggttttgggggtttgaagttgaggattttttggtaagtgagttttaggaggtgaagggaaagggtgagtttgtgttttttatagttcggttttttatttgtttgtttggtatttgttatttagtttaggtttattattttgtgatagtagttttagtatagtttgggagttagaatttgttttgtgttattttttcgtttcgtttttagtttgtgttggatatttgaacgtttttttatatttgattagtttggagaggaattggggtattttttgtttttggggaaatggagttcgtaggtttttggatttatttttagttattgttatgtttatttttttatttttttagcgtgcgttttttggttttaacgtttttattatatggttcggtttttggtttattttcggggtcgtggtattggttgaagtaggcgtgggttagtgttttagttgtattgattttttggttattgtttagtattagtatttttttaaggaggtttatggttgtagggaagttagtggtggggaggggggttagttgtatatttagggttagatatggagtttagtttagtttagggtagtttttatttagggggttggttttacggaagatgttgtttaggtttttttggggtatggggggtagggattggatatatgttcgggtttgggggtatataagaatatttggggaggttgtttattttttgtttttttggttttaaattggggttttttttggtaagtttttagatttatttattttaataggttaggataagggtataggtagattagtgattttttttatataggatttggtggttttagttttttagttggtttttaatgtttgtaggagttgggtttaagtatattttttttatttagtttatttttattgttttggttaggtattgtttgttggggttttttagtttatttttattgttttggttaggtattgtttgttgggtttttagtttatttttattgttttggttaggtattgtttgttggggttatggttttgtatttattgtttttggtgttaggaatgttttttttttttttttgttttttttgtagggattgggtatttgttttaggttttattttattatattttatgttttttatatggttttcgtatttttatattatttttttttttagagagtttgggggtttagttaggagagggagttgttggttggcgggtattaatttacgtgttttgaggagatttttgttagaattttagggttgggtgtgtttattatttttatgatgcgttttagttggttaatgtttgtgttatttaggaaatatttacgggttagttatagattttttttgggtttttagatttaaaattttggggcgttgtttagagttcgtttttttataggtgaggatggttagtttaaagtagtatagtatggggggtagaggaggtaagattcgttagaaggggttagcgttggtttttattttataggaggggttttgtttgattttgttttttaatttgggttaaggatatagtcgtttttcgggaagagggttttgttttggagtagtttagttatgatgtagtttacggattagatatttattgtgcgagggcgaggggatttttattagtgtgtttattttacgttttttttttaggagatttatagttatatttagattttaagatgggtagatttttttttttgttatatttaatttttttaggtagggggaggtttatagttgtatagttagaggaggttagtatttattatgttttagcggtttttgaagggttatttttgaa

SEQ ID NO: 417 - DNA, 15416 bp, Artificial Sequence
  chemically treated genomic DNA (Homo sapiens)
tttcgggtttaagtaatttttttggtatttagttttttgagtagtcgggattataggtatgcgttattatatttagttaatttttgtatttttagtagagatagggtttcgttatgttggttaggttggttttaaatatttgattttaagtaatttgtttgttttggttttttaaagcgttgggattataggcgtgaattattatatttagtttgatatttgtttataggttttttttttgatgtaaaatttatatataatgaaatgtataaatttttagtatatatttgttgtattttgataagtgtttatttttgtgtgatttaaatttttattaaggtatagaatatgatcgttattttagaaagttttttttttttttttttagttaatttttaagtttttttttttgtattttatttgtttatttttttttattattattattttaaattatttatttattttttgagatggaatttttttttgttttttaggttggagagtagtggtacgattttggtttattgtaattttcgttttttgggtttaagtgatttttttgttttagttttttgagtcgttgggattataggtatgcgttattatgttcggttaatttttgtttttttagtagagatggggtttcgcgatgttgtttattttggttttgaatttttgattttaggtgatttatttattttggttttttaaagtgttagaattataggtatgagttattgtgtttagttttttttttttttgttttagtgaagttagagtaatagaatatagagtatgtggataggttgtgggtgtagtttttgtagaatagaattttatattttcgtaatatgtttgtatttggttagattatggtatttattagtataaatggtagtatggtatttattttttgtaatgatttagagtgaggtatttttatttttttatttttataaataatgttgttatgaatatttttttataaatttttatatatatgtatgattattaatagttaaaatagtaatattggttaggtgcggtggtttacgtttgtaattttagtattttgggagattaaggcgggtggattattagaggttaggagtttaagataagtttgggtaatatggtgaaattttatttttattaaaattataaaaaattagttgggtatggtgatgtgcgtttgtagtgttatttgtttgggaggttaagttatgagaataacgtgaatttggaggtaggggttgtagtgagttgagattatgttattgtattttagtttgggtaatagagtaagattttgttttaaaaaaaaaaattagtaatatttttttttatttgaattagatgaaattttggttttttaatggtatgaattggttaaagttttttataggttttgtatttttaattaaatttagtgttcgaatgatatttagaaatttgtatagtttgtagttttttgtttgaagaggtaatattcgttattgggtggtttggttttgagtttttggtaatttgagggtgggcgttttgtttaaagataattgttaaggttatatggaatatttggtgattgttttatttaaatagaggtgtttgattttgttttttttttagaggttgaaattggggttttaaggtgaaatttagttgtaaattattttttttttatttggaatgtgaaatgaaaaatgtatttttgaggttgggtgtagtggtttatttttgtaattttagtattttgggaggttgaggtaggtagattatttaaggtcgggagttcgagattagtttgaataatatggtgaaatttcgtttttattaaaagtaaaaaattaattaggtgtggtggtatatgtttgtaattttagttattcgggaggttgaggtaggagaattatttgtgtttaggaagcggaggttgtagtgagtcgagatcgcgttattgtattttagtttgggtaataagagcgaaatattattttaaaaaaaaaaaaaaatgtatttttagtttaattattgatatatgtattataaaaaataagtaagttagattttttaataaaggttttttaagtaaggaatatatagacgttattttttttttgtagttttttttaggatgggggattttgatattgttatatattttttttagaaattattttaatttgttatttttatttattttagtgggaagataaaattattatatggtagagttaggagttttaggtttatttggggatttttttaaggatattttataaatgtaaatttgttggttatttatatgtattgtttaattgttttttcgtttttttagtgattatgttagttattattattattattaaaaaggttaattttttttaagtaatttatttttttgaattgtgtattagtttgttaagggatgttatagtaaaagaattaataaataatataaatgtatttttttatagttatggaggttggaagtttaaggtgtaggtagagttggtgttttttgaggatatattttgtggtttgtagatgattatttttttttagttttgtgtgtttgtattttaatttttttataaagatattagttttattggattagggtttattcgtatgattttattttattttaaagattttatttttaaatatagttttattttgagatgttgggggttaggattttaatatgtaaatttggtgagggagtagaatataatttagtttataagaaattataaaatataaatatgtaagagaaatgtgagtataagaaaaagttaaaaagtttatatatagtttttttagttggaataaattaaagtgtttttttgtttttgttatatgtatatttaattattggtttttattagtttataatattaatagtaatgtaagtatatgttagttttattataaatttagaattaggtatttttaaaaataagattagttatatttttattgtattttttttttaatttagttttttaattttttttaatgaatttgttaggttgaaggtttttttatatatatataaatataattatatatatatatattttttttaatagatggagttttgttttgttatttaggttggagtgtagtggtataatttcggtttattgtaatttttgttttttaggtttaagcgatttttttgttttagtttttttagtagttgggattataggtatttgttattatatcggttaatttttgtttttttttgtatttttagtagagatagggttttattacgttggttaggttggttattaatttttgattttacgtaatttattcgttttggttttttaaagtgttgggattataggtgtgagttaatatttttagttttttttaatatatgttatttataatattggatgtgtgtgtgtgtgtgtgtgtgtgtgtgtgtgtgtgtgtgtgtttaaattaattttttagtagttgtttaatttgtagtgttgtttttaggatttttattaaaagaatatatattaaatttttattaaaggttagttatgatggtttataattaagatgttttaggagtaataagagttgggtgggttattgatttttagatgggaatttggttatgtttataagatttggatttgaagatattgggtagttaacgaggtttatggaggagaattttggcgggttttttattgaagtatatttatttgtttttatttttaatttgtttttaatgtttttttatttgatgtttacggttagttatttttaggatttgagttattaagatgatggatgaaattgggtttggaataagaaggtagggttattttgatttaggatatatttttaatatgttgtgaagaatttttagtattaaataatatttgggtggaagaagttttgggaaagaagtttagttgtagattatataatgtttttaaatgggagaaaatgtttagttttatggtttagattttttgggaagtaggataattggttattttattttaggtaaggttgtttggttagaaatttatgttttattatttcgagtatattatggttggtttataaatcgtagttttatagagaattttttttttttttagttattgtttttttaaaataaaagtttttgtgtaaagtaatggaagaaattttatattgttttttggggttgttattttatgtaatttataataatgattacggttcgttttatataagatgtaaaggatttgggagagggaatttagtgtgtatttaggggaagatggtgatgtagatagtatattttaggaggttgggaagtgtcgagtgtttaaatatatgttttttaaatttaatgggtatataaattatttggtggtattattaaaatgtaatttttaatttagtagttttgggatgggtttatggatagtattttggttagttttttttgggatttttttttttttttagagaagtgtagagggttggggtattgggtttaagaggagttttagattgtaattatagttttaggtaatttttttttggaagtgatgtgttagcgattggaggagaaagggatttttgggattttttttagttttattattttgatttggggttttgagattttaataaagtggatttttgggagttatagatttttatgggaatgatgaaagttgcgtatttttttttcgtataaatgtaggtttatttttaattttgtaaattattttaggtttcgcgggttcgtagttttggtttaagatagttgtttgttttataggtcgcgtatttagagtcgggcggttttgtagtttagtatttggttcgggttgcgcgtcgggttttggcgggggcgtgttaggaggcgtgttcggggcgtgtcggaggcggggttaaggcgggggtaagtttcgtttttcggtcgtgcgagaggtcgagtttgttgtattgtagtcgtcgcggcgtcgttcggttttttatttttaataatggcggtttcgagttcgagcggcggcggcggtttcgggggcggtagcggtagcggtattttcggtttcgtagggttttcggcgttaggttattcggtcgttagtagtatgtagggtaaggaacgcggtcgcgtcgagattttagttttttagcgcggtaattcgcgtcgtcgcggtttgttttagcggacgttttcggattcggttgaggaagttacggtagtcgtcggttttttttttttttttttttcggtttttcgtttcgttttcggtcgttttcggttcggtttggattcgggtttcggttcgtataggtttcggtcgcggtttttgtttgcgtttggtttttgggttttatcgggtttttagtaggttcgtagggtttatttggttcgggatcgttttcgcggtcgtttttatcgttttcgtcgtttatttggcgttcgttcggttttcgttttcgggaacgcgtcggttcggggttgcggcggagcgggaggggcgtcgggtttgttttttggtttttgacgtcgtttaggtaggcggcgaagatagcggtttcggtcggcgtttttcggtttcgtcgtcgtagtgggtttcgtttagggttattttggttgtcgtcgggtatagttggagtcggattatcgagttgatttcgggttacgggggttttttggaatttgcgtttttaaatttttgtagggtttttgtgcgttggaagggatgggggtggggggcgggttgtttaggtttgtgttatttgtaaggtaggtaggttgtattggtttgggagaggtattttgttttaggttagggatttttgtgttagtattgcgtgtaggaagaaaaaaaaaaaaaaaaaaaaagaagatttaatttggtttaaatggagagatataggaaatagataggggttaaagtgatattgtagtgtttggatatttgaggtagttttgttaattaatgattttttttattgggaatgtttattagttgtgtatggtttttgatagggggtgttgtgaaaatattaggttaggttcgagtttgttagggattatttttttaaatttattggggaattttgagtagtaatgttatttttaaaatagggaattttagaatttttttgataattttagtaaattgtttgtgttgaattattaatagaataagggttggggtatttttggtagttagtgtgattatggttattttttgattttattttttttaaagggtttttagtatttagttaggtttaatagatatttattgaatagtttatgtttatagagtatgttataatttagaaagaagagataggattttatttatttttatatttttgttattttttttatgaaataattttaatatatataaaaattagtgatagatatatagataggatgatgttagagtttagaggatattttttgtgtaggtttttagataatttatttaaattgaattagttattggatgtttattgtgttgtatagtatattatattgatgaagtataagattgattttttgattgtatagttttataatttaggtggtggtggttggggcgaaatgaaatggtaaaatgataatttaggattgtattttttgttttagatgggtgatttataaagtttataaaaataaggtgatttgtttgtttgttttattggtggggaggttgatagtttgaaatagttggatatagtgtgtttttttggtttaaaaaatatttattgagtatttgtataaaacgtttatgttgagtttatagagaattgaatatttttaattgtttttatggaggttatttttttgtgaagatgggggagggaaggttatttagttaaatatgaaaaattattagttggaaaagtaataaaggtaataagttgggttttgtgatagaagataatagagggtagttcgtttgataagatggttagagaaggtttgtttggaaagttaatttttttttatttgaagacggttttaggtagaggaattgtgtgtatgaaggttttaaagtagggaagagtttggagtgttttaggaatttttaaggtagtggttaggattttttttgatgttgttcgttttttttagtttttgtatgttgatatttagttaattaaattttttaataagtagaatttattttagaaggaaaaaggatttaagatttttttatgaattattgtcgaatttttttttttattaatattgtgtttagttttgattgatttaggaatgtgttatattttgtttttgaaattttttttattagttagaatgaagtgtttgatatttttaggatgttgtttagaatagtttgttataaagtttgaatttaagtagtaatttaggatttttttttttggtttgttttgttttgtattttaattgtgaggtttttgaagaggaaattttataagaatttaaaaagaaagatttttatttaattgtatgggagttatattttttatattgtattttatttgttaagggtttttttttgttttagattagattttatagagtgggttttagaagatgtttgatgtatttttatttttttttttttaatttaattatatttgttatttaaaaaattttttttttgggagttgttaatgattatgttttttgaaatagtaggatttagttgtggaatataaggaatgttttatgtagtagatattggatatttttttatgtggtaagtattgtggtgggtattggataattttgaatatttttttatggttttatgtttatggtttaagagtggtttaggttggttaatattgtttttttaatatattgtttaagaattagagttttggagttttgggtttgaattttttggttaggatttagatatgcgttttgtgattaggggtaatgaatttggtttttcgaagttttagttttttatttggaaagtgggaataacgtttattttttcggtggttttgagaatgtatgtaagtttgggatttgatatgtagtaaggatgtaatatatattagttattattgttagtagcgataatattgttatggttttattaatggttttttttattattggtaaatgagtttttaattttttattatttattatataatttttttagtttatattattaggttttattgttttttttaatttgttgatttttttattttttattattgagtagtttttttagagtattttagatgagattttattttattttaaatttcggatttgtttttttttggatttgaggatttttaaatgaattataatgtgaacgatatgaaatagaagtttagttattaatttgttttatttattttttttataggggatgggtagatggttggaatgggatttatagtgaatttgattataagagtaattaatagacgtagttttggttgtatgtttatgttaatagttatggtttttaatttggttatttttgttattgttttttagataatagggaatagttgttaattttgttattatttaaaagatttgagtgtttttatttattttgatttattttttttttatgtttatttataaatatatttaatttttatacgttgagtagtttttaggttttggttttttgatgattaaagttaataaaatgtagatttgtttgttaagttaggtaagtggttttatgaaagtatatttggtattaggatgagtttgtatttgagagaggaaataatatttaaattaattattttgagaaatgtttttatttttaatgttttattaataatttgttaatgtagatagatttaataggaaaattttttgtatattagggttttattttgtggaaaagtattattttttagtttaagaaattttagttaatttaaagtacggaattgatttgtagtatttaagaatttttttagttatggttagggtttttttttgtggtaaatttaaagtttcgtgattttagttgggttagtgtgaattttgtaaagagaagatttcgttatattaggtaattaattttagatatgtatagtaaatagtattagatagtatggttggtatgttagagaatagtatattttgattaatagagtttgttagttgagaatttaatagtttttataatgaaattgtataggtaggatgattttttttttagtagtagttgtagtagttagcgtttttatagtatgtagtaatgtttaagaaataaaaggatgttgaagtgtaaagagtattggatttagatttagaaaattatggttaaggtaattgttttgttgtttataaatattgagattttagggaaattttttaattttttttaattttttgtttagaaattttttatttgttaaaatagggataatgtttaatttgtagggttattgtaagaattatatttttaatgtatgtgaaagtgttttgaaaattatagaatatttataagtatatatagattgttattagatatgattatttgtttgttgtagttattaattatttaaaatgtaatagattttaaagatcgtttagttgagaaatgttagtttttaatagatgtttttttaaaatggttagaatagaatttataattgatttagaaaaatattgagttatttgtaaaatatttgttataagaaatagttagaaagtatatgttgtaggtgtttttgatttttttaaagttttgatttatagaaaattttgtgattagtcgagtttttagttatttatttttagttgagtatttttatgtattagtttaagtagaaagatgatagtttgattttgttttagaaaatacgtttagtattttaaaatgtaatgaagtatatttgttaagaaaaagttaagagatttaaaattaatgtagttattttttttaaaaatatttgaatataaaatgtatatgaaatgttttgtttttgattttgtttatttgtttttattaattagtttggttttcgagaattatgggagatttttattttaattttaaagaattgatttgtgtagatagtgaagagttttaaattttagaattgtttgttttttttagtgtgttgtataatattttttttattgtttaatataattttatataagtttattttagtaaattagtttttttttaaagtttagattgtatttttttttatgtttttttaaaaattagagtaattttagtattaaagtaaaaaagtggaaaaatattttattttatttttagaatatatatttttttatatttttttttaaaatattttattagtttgaatgtgtgttgaaatttgtttaagatgggatattagttaattttgtattttgagtcgtttttttttttcgtaaatttttttttttttattaatttgagaagttggattgatgtgagtttatagagtttttttatttttaggggtttggatattataattttaattttattttatataatcgaggttagttttttttgtagtttttaggaagtgtagatggttttaatgatataatttgagaaattttaattgaggtttaaaaaagaaagggaaagtaatagttaataattttttttattgtttttatttaatttgatgtttataattattttttaaaggtaagtggatatagttttttttatagatgagggggtagacgtttatttgtttcggaagaggtaggttttaattatttgggtgattggtagtttttgttttttttattattttattgtatggttttttgagtttttttaagttatttcggttatttaggtttgaaggaagtatttttgttagaagtgatgtagatttaggaatggaggagagagattattttaggttttagttagggggcggaagttttaagtaattagttattttttgagatgattttggagttttggtgttttaagaatggtgtattttatgttataatgttttaaatttgttggagggtttatagtggtattttgaatttggagatatttcgattgggaatttttaagtaagtagaagattttaattagaggaaattattgtagatttgaaaggtaatagaatttttttaatattatatataaaaggaatttatttgttataaaatttaataaatgttgtcgttttggttaaatttgtaatttgggtaaattattatttttgttagtggatgtgggttagtttttagttgtttttttttaattttagaaaatttttaggtgtttttttatgttcggtaaggttgggagtttaatgtgtatttaaattaatagaaagtatttaagtcgtaagattggttttgtttgtagttatatagtgaaagggagatgattagttagtagtttatataatttaaggtgggttttttgaatgaagaaaataattatattgtatgtagtttggttttttaagaataatatattattttttattacggagaaagaggattaaaatggatattatagtagttttttcgagttatattgtattttattttatttaaaattgtttaaatattgaaaaacgaggaattaagaaaagtgttgttagatatatatatttgaatatatatatatatatatagatattaaattgtttaaatatttaaaaaaagaggaattaagtaaagtgttattagatatatatatttgagatatatatatgttagatgtatatatatttgatatgtttatgtttatttattgtttggttttgttgaagaaattagtgatattaaggagtttttttgatgattttggtagtttttttgggatttggttatgtgtttgttatggggaagtatttatttttttggggttgttagagtttttaggatattaggttgtgtttaggaagggttgtggtagaggtgtagagggtggggtgtggatttttagggttgtttggagttttttttttttaatttttttaaggtgattgtgaatgaaaggagaaagattggttttgtgtaggttaagttggtttggtgagtattagaaagatagggaaggtgttataatcgttgtttttatgagggagagaataggaataatagtgtttgtgataataataatttgttttagtttaggtttttggttggatattttagatatatttttttatttaattattataaagtttttttgggtattattttattttttataaatgaggaaattgaggtttatagaagttagatatttgttcgaaggaatataattgtaagttattgttttagtgtattgtgttttattaaataggtttgagaaggtaatgtggtatttaattttgtggttaaagaataaataaggtggttattgtttaaagagagaaaaagagttggtattatgaggatatttgaatttaaaaagtgtggaagggatttgatgagtattttattaatttttgattggtggatgattttaataatttggaattgttaatttagggtggtttttttttgatagttttagaaagttgatataaggaaatttgaaagaaataaattattaggaaataaattttggggaatttgttttgagtataatgaaaatataaatttagggtaggtttagataacgttttatatgttagagttataatgatatattatgggtagttgtggtttaaggtatatgttagaattttgaagttggaagtttgaaggtgttagataaatagattttttatgtttgtgatagaggaaagattttgtagtacggttttatgggtatgatttagtaaggtagttttgattttttttatattagtgtgggtttatattgtagtttataatgtatttttagtagtgtaaaaatttagaatgtttagggaattagaagtaattattgaggagataggaaattatttatgttcggttttatattttttttgatttatattattaatttagaggaatgggaatggagataattataaaattttataatggttattatataagtaaaattagatttaggtatattgtttttaaatttttaagataatattttttatttaaaaatgataaaattaggatttaagtgaaatgattttagttttatagttggaattagaattttggttttttaatatattttattttgttttttattttatcgaatattatttgttttttgtttttataaatatttatatattttaaatagtcgtttattttattgtatttggtaagaatagtaaattgtaggttttaagttatggttatataaaagattttaaaattgaggtaagagggtgagaatgaggggtaaatgtgggaacgagggtaggagatacgtagagagaaaaaggaggaggaaaaatttttatgtagttttattttttttataggtttattagtattttgttttatgtattttgatattgatttattagtgttaagaattaagaatttaaatttttaaataaatattatttttgatatttattttaagatttaattaaatttgtttggggttaggaaaaatgaaaaagatttaaatttatttttatttgtaatggggaaaatataaatggaggattatgttaaattaagttttagggtatagatagtttatttagatataaaaaagtgaggtatatacgatttaaaatgtaattagttaattattaataggtttaacggattatttagtatttttagagataggatttaaagtaagtgaataggaagttagaatttcggagataagggagattttaaaaattgaatatattggttaggtgagatggtttatgtttataattttataattttgggaggttgaggtaggaggattgtttgagattagtttgggtaatatgttgggattttatttttataaaaataaaaaataaaaaattttaaaagttagttagatatagtggtttgtatttgttgagatgagaggattgtttgagtttaggagtttgaggttgtagtgagttatgattatgttattgtattttagtatgagcgatagtaagattttgtttttaaaaaaaaaaaagaaaaaaagaaaaattgaatatatgtgagtgaatattagtgaatattatattataattaagaatttgtattttgtaaagttgaggatattggaagttttttttattttttttttttattattttttttttgtgtaagattgttgtttgttttttttgtttatttttattttttgagtatgagttagtggagttatttggtatttttttaaatttgtattataagtattaattttttgatttttgtaggttttaaagatttagatagattaattaaaaacgttttttttttaatttaataatgttaagaaagttatagaattgttaaagaaaaggtgagttagtgtgttttagttaatttagattttgtttgttagtggattttgggcgagttattaagtatttttttagtgagaaataatgtggagagatggatgtttggatgagattttagaattcgtttatttggttattttataattagatataaagaataagtttatatttatgttttgaatattttaattttttttttattttttttgtagttatttatatagattttgtattggtgatagaattttaggttttgagaattttttaatatttaaattggcgtttagtttttaatgtgttagagtaattattggcgatattttgttatttttagttatatatattttaaaatttttaatatattatatatttattaagtaatgtaattttttttaatataattttatatatagatttaattgattttttttttatatattttataaatttgtttttttgtttttttcgttatttatattattattttgtttatttttttttttttttttttatttttttttttttgttatttagtaatagttaattagggtattttgttttaaagttgtttgttttttagttttttttttagttgtagtagaaggtgagttttatttttttttttttagtgggatgcggggaagatttgtttgttatttttagagaatttttttttttttgaatgtagttagtttattttgcgtggtaggaggttagtggtttttagttgtttaggtttgtaagatttatatatttttgtttttttttttgaattttgtttttattgtatatttggtggggtagtatattgatttttagtggtagagagattagggttagattttttaggtttgttttagtattttttttttatgaagtttttatttttatttttttttgtattgttatttttatgataaggtagttagtagtggattatttcggtggtgtattaaagatattttttatgttaaagtagttatattagtattttttagtttttgtattttatagatggtatttttttagaa

SEQ ID NO: 418 - DNA, 15416 bp, Artificial Sequence
  chemically treated genomic DNA (Homo sapiens)
ttttaagaagatgttatttataaagtataaaaattgaaaaatgttaatgtagttattttgatatgaaaagtgtttttggtgtattatcgaagtaatttattgttgattattttattatagaaatgataatgtaggaagaagtgagaatggagattttatgggaaagaagtattagggtaaatttagaaggtttgattttggtttttttattattgaaggttaatatgttattttattaaatgtgtagtgggaatagaatttagaaagaaaaatagagatgtatgggttttataagtttaagtaattaaaagttattggttttttattacgtaaaatgagttgattatatttaggaagaaaagggttttttggaagtagtaggtaagtttttttcgtattttattggaaaagggaaggtaaaatttattttttattataattggagaggaggttgggaaataaataattttaaagtaaaatattttgattgattgttattaggtagtaaaaagaaagaggtgaaaaggagagagaagaggtgaataaaatagtaatatggatggcgaaaggagtaagaaaataaatttgtaaggtatatgaaaaagaaattagttggatttatatgtaaggttgtgttaaaaaaagttatattgtttaataagtgtataatatattaaaaattttaaggtatatgtgattgagaatgatagaatgtcgttaatgattgttttaatatattaaaagttaagcgttagtttaagtgttaaaaaatttttaaaatttgaaattttgttattagtatagaatttatataagtagttataaaggaggtgggaaggggattaaaatgtttaaagtataagtatagatttgttttttgtatttaattatgaagtgattaggtgaacgaattttggggttttatttaaatatttatttttttatattattttttattaagaaaatatttggtaattcgtttagagtttattgataagtaaggtttaaattaattggaatatattggtttattttttttttagtaattttgtaatttttttaatattattaaattagggaagaagcgtttttagttagtttgtttaaatttttaagatttgtaaaagttagaaagttagtgtttatagtgtagatttgggaaagtattaaatagttttattagtttatatttaaagggtaaggatgggtaaaggggataagtaatagttttgtataagagaaagatggtgggaaggaaaaatgaggaaaatttttaatatttttaattttataaaatgtaagtttttagttatgatataatatttattagtatttatttatatatgtttaattttttttttttttttttttttttttagagatagggttttgttgtcgtttatgttggagtgtagtggtatgattatagtttattgtagttttaaatttttgggtttaagtaatttttttattttagtaggtgtaagttattatgtttggttaatttttggagttttttgttttttgtttttgtagagatggagttttaatatgttgtttaggttagttttaaataatttttttgttttagttttttaaagttatgggattataggtatgagttattttatttggttaatatgtttaatttttgaagttttttttgttttcgaaattttgattttttatttatttattttaagttttatttttggaggtattagataattcgttgaatttgttgatagttaattggttatattttaagtcgtgtgtgttttatttttttatatttgggtgaattatttgtattttggggtttaatttgatatgattttttatttatattttttttattataagtaggggtaaatttgagttttttttattttttttggttttaggtaagtttaattaaattttagaataaatattaagaataatatttatttaagaatttaaatttttaatttttgatattgatgaattaatattaaaatgtataggatagaatgttagtaagtttataaaagaaataaagttatatgagggttttttttttttttttttttttttacgtattttttattttcgtttttatatttgttttttatttttatttttttattttaattttaagattttttatgtggttataatttgaaatttataatttattgtttttattaaatatagtgaggtaagcggttgtttaggatgtgtaagtgtttataaaaataaaaagtaaatggtgttcgataaagtaaaaaataaaatgaagtgtgttaggagattagagttttagttttaattgtgaaattgaagttattttatttgagttttagttttgttatttttaaataaagaatattattttaagggtttgaaaatagtgtgtttaaatttaattttgtttgtgtaatggttattatgaggttttgtagttatttttatttttatttttttaggttgataatataaattagagagggtgtggggtcggatataagtggttttttatttttttagtagttgtttttgattttttggatattttggatttttgtattgttgaaagtgtattatgaattataatatgaatttatattaatgtaaagaaaattagagttgttttattgggttatgtttataagatcgtgttataaagttttttttttgttataagtatgaagggtttatttgtttgatatttttaaatttttaattttaaaattttggtatgtgttttaaattatagttatttatagtatattattatggttttaatatgtaaggcgttatttaaatttattttaaatttgtatttttattgtatttagagtaagttttttaagatttattttttgatggtttattttttttagatttttttatgttaattttttgaaattattaaaagggagttattttaagttagtaattttaggttgttagaattatttattagttaggagttgataaaatatttattaaattttttttatattttttaaatttaagtgtttttataatgttagttttttttttttttttgggtaatgattattttatttattttttggttataaaattaaatgttatattatttttttaagtttgtttaatgaagtatagtatattgagatagtaatttataattatgttttttcgggtaagtatttaatttttatgagttttaatttttttatttgtgaaaaataaaataatatttaaaagagttttgtgatgattaaatgggaaaatatatttaaaatgtttaattaaaagtttggattaaagtaggttattattattataggtattattatttttgtttttttttttatgggagtaacgattatggtattttttttatttttttggtgtttattagattagtttaatttatataaaattagtttttttttttttatttatagttattttgagagaattaaaagggaaggattttaaatagttttggagatttatattttattttttatatttttgttataattttttttaggtatagtttggtattttgaggattttaataattttaaaaagatggatgtttttttatgataggtatataattagattttagggaaattgttaaaattattaggggagttttttaatgttattgatttttttagtaaagttaggtaataaatagatataggtatgttagatatatatatatttgatatatatatattttagatatatatgtttggtaatattttgtttgatttttttttttttaaatgtttgaataatttggtgtttgtgtgtgtgtgtgtatgtttagatatatatgtttggtaatattttttttgatttttcgttttttaatgtttgagtaattttgggtaaaatgaaatataatatagttcgaaaaagttgttgtgatgtttattttaatttttttttttcgtggtggagaataatgtgttgtttttaaagaattaagttgtatataatgtaattgttttttttatttaaaaggtttattttgagttgtgtaaattattggttaattattttttttttattgtgtagttataagtaaggttagttttacgatttgaatattttttattaatttaagtatatattaaatttttaattttatcgagtatgaagagatatttgaagattttttagagttgggaggaaatagttagaagttaatttatatttattagtaaaaatagtaatttgtttagattataaatttagttagaacgataatatttgttaaattttatgataaatgagttttttttatatatagtgttaaaaggattttattattttttaaatttgtaatggttttttttaattaaagttttttatttatttggagatttttaatcgaaatgtttttagatttaaaatgttattgtaaattttttagtaagtttagaatattgtaatatgaagtgtattatttttggagtattaaggttttaaaattattttaaaaggtggttggttgtttggagttttcgttttttgattgaaatttaaaataattttttttttttatttttgaatttgtattatttttggtaaagatgttttttttagatttgaatggtcgaaatgatttaaagaggtttagagaattatgtagtagagtagtaagaggagtaaaggttattagttatttaggtggttaaaatttatttttttcggaataaataaacgtttatttttttatttatgaaggggattatgtttatttatttttaaagggtggttgtgagtattaaattaggtaggaatagtgaaaaaagttgttaattgttatttttttttttttttttaagttttaattaaagttttttaggttgtattattggagttatttgtattttttagagattataaaggagattgatttcgattatgtagaatggagttaggattatgatatttagatttttaaaaataaggaaattttatgggtttatattaatttagttttttaaattagtgaaagaagaaaaatttacgaaaaaagaaaacgatttaaaatatagggttaattaatattttattttaaataagttttagtatatatttaggttagtaaggtattttaaaggaaaatgtgagaaaatatgtattttaaaagtgaggtgagatgtttttttatttttttattttaatattagggttgttttaatttttaagggaatataagaagaaatgtagtttgagttttgaggggggattaatttgttgaggtgaatttgtatgaggttatgttaaatagtaaaagaaatgttatgtaatatattgggaagggtaagtagttttggggtttgaaattttttattgtttgtataaattagttttttaaaattaagataaaggttttttatggttttcgaaaattagattaattagtaaaaatagataaataaaattaaaagtaggatattttatatatattttatatttaaatatttttgggagaaataattatattgattttaaattttttgatttttttttaatagatatattttattatattttaaagtattgggcgtgttttttaaagtagaattaagttattatttttttatttaaattgatatataaaaatgtttagttaagggtaaatagttaaggattcgattggttataaagttttttgtaaattagaattttaagagaattagaggtatttataatatatattttttaattattttttgtaataagtattttataaatggtttaatgtttttttgaattaattatagattttattttaattattttaagaaaatatttattgaaaattgatattttttagttaagcgatttttgaaatttattatattttaagtgattagtagttatagtaggtaaataattatgtttaataataatttgtatatatttatagatattttataatttttaaagtatttttatatgtattaagaatgtgatttttataatggttttataggttaggtattatttttattttaatagatgagaaatttttgaatagagagttgagaaaagttagggaatttttttaaaattttagtgtttgtaaatagtagagtagttattttaattatggttttttgagtttaagtttagtgttttttatattttaatatttttttgttttttaaatattattatatgttatgggaacgttagttgttatagttattattggaaaaggaattattttgtttatgtaattttattatagaagttgttgaatttttaattggtaagttttattaattagaatatgttattttttaatatgttaattatattatttagtattatttgttatatatatttaagattaattatttggtataacgggattttttttttataggatttatattaatttagttaaagttacgaggttttagatttgttataagggaaagttttagttatggttaggaaggtttttgaatgttataagttaatttcgtattttaggttggttaaaattttttggattaaagaataatatttttttatagaatgaggttttaatatgtaagaaatttttttattaaatttatttatattaataaattattgatgaaatattaagaataaaaatattttttagagtagttaatttgagtattgtttttttttttaaatgtaaatttattttaatgttaaatatatttttataaaattatttatttaatttggtaaatagatttatattttgttagttttagttattaaagaattaaagtttaagaattatttaacgtataaaggttgggtgtgtttgtgaatgaatatgaaaaaaaaatgagttagaatgagtgaagatatttaaattttttgagtaataataaaattagtagttattttttattatttgagggatagtggtaaaaatggttagattagaagttataattgttagtataaatatgtaattaaagttacgtttgttgattatttttataattaaatttattataaattttattttaattatttatttattttttatgaaaaaaatgagtagagtaaattgatagttagatttttgttttatatcgtttatattgtaatttatttgagagtttttagatttagaaaaaaatagattcggagtttgaagtagaataaaattttatttaggatattttgaaaggattgtttaataatgaaaagtggggaaattaataggttagagagaatagtgggatttagtaatatgaattaaagaaattgtgtggtaaataatgagaggttagggatttatttattaatagtaaaagggattattaatgagattataataatattgtcgttattaataatgatggttaatgtgtattgtatttttattatatgttaggttttaggtttatatgtatttttaaagttatcggggaggtaagcgttatttttattttttaagtgagaaattgaggtttcgaaaggttaagtttattgtttttggttataaaacgtatatttgaattttggttaagagatttaaatttagaattttagagttttggtttttaagtagtatattaagaaagtaatattggttagtttggattatttttgggttataaatatgaagttatgaaaaagtatttaaggttatttagtgtttattatagtgtttattatataagaggatgtttaatgtttattgtatgaaatattttttatgttttataattgaattttgttgttttagagagtatggttattaataatttttagaaaggaagttttttgagtggtaagtataattagattgggggagaaggaatggaagtatattaaatattttttaaggtttattttgtgaagtttgatttaaagtaaaagaagatttttggtagatgaagtatagtatgggaggtgtgatttttatataattggatgggaatttttttttttgggtttttataagattttttttttaagggttttataattaagatatagaataaaataaattaaaaagaaggattttaaattgttgtttaagtttaagttttataatagattgttttagataatattttgagaatattaagtattttattttgattaatgaaaaaagttttaagaataagatataatatatttttgaattaattaagattagatataatattgataaaaaagaaaattcggtaataatttatagagaggttttaggttttttttttttttaaaatgggttttgtttattagaaagtttagttaattgggtattaatatataagggttgaggagaacggatagtattagaaaaagttttaattattgttttaggagtttttagaatattttaagtttttttttgttttggaatttttatatatatagtttttttgtttagaatcgtttttaggtaaaagagggttagttttttagataagttttttttgattattttattaagcggattgttttttattattttttattataaaatttagtttgttatttttattatttttttaattagtaattttttatgtttagttaaatagtttttttttttttatttttatagggggataatttttatgaggatagttagagatgtttaattttttataaatttagtatgagcgttttatgtagatgtttaataaatattttttgaattaaaaaaatatattgtatttagttattttaaattgttagtttttttattaataaaataaataaataaattattttgtttttataagttttgtaagttatttatttggaataagaaatataattttaaattgttattttgttattttatttcgttttaattattattatttaaattgtaaagttgtatagttaggaagttaattttatattttattagtataatgtgttgtgtaatatagtgggtatttaataattaatttaatttgaatgaattatttgagggtttgtatagaaagtgttttttaagttttgatattattttgtttatatatttattattggtttttatgtatattaaaattattttatggggagggtgatagggatgtaaagataaataaaattttgttttttttttttgaattatggtatgttttataaatatgaattatttaataaatgtttgttgaatttaattaaatgttagaagttttttaagaggaatggaattaaaaagtaattatggttatattgattattaagggtattttaatttttattttgttaataatttaatataagtagtttgttaaagttgttaagagagttttgagattttttgttttaaaaatagtattattatttaaaattttttagtaaatttaaggaaatggtttttaataggttcgggtttggtttggtatttttataatattttttgttaaaagttatatatagttaataagtatttttagtggggaaagttattaattagtagagttgttttaaatgtttagatattatagtattattttgatttttgtttattttttgtatttttttatttaaattaaattaagttttttttttttttttttttttttttttttttgtacgtaatgttaatatagaaatttttggtttggaataaaatgttttttttaggttaatgtagtttatttattttataggtggtataggtttgggtaattcgttttttatttttattttttttagcgtatagaaattttgtaaaagtttgaaaacgtaggttttaagaggttttcgtagttcgaggttagttcggtggttcggttttagttgtgttcggcgatagttaagatggttttgagcggggtttattgcggcggcggggtcgaggggcgtcggtcggggtcgttgttttcgtcgtttatttgagcggcgttagggattagggggtaggttcgacgtttttttcgtttcgtcgtagtttcgagtcggcgcgttttcggaaacgggggtcgggcgggcgttaggtaagcggcgggggcgatggggacggtcgcgggggcggtttcggattaggtgggttttgcgggtttgttgagagttcggtagggtttaggggttaagcgtaggtagaggtcgcggtcggggtttatgcgggtcggagttcggatttaagtcgggtcggaggcggtcgggagcggggcgggaagtcggggagggagagagggagaagtcggcggttgtcgtggtttttttagtcgggttcgggggcgttcgttggggtaggtcgcgacgacgcgggttgtcgcgttagggggttgggatttcggcgcggtcgcgttttttattttgtatgttgttgacggtcgggtggtttggcgtcggggattttacggggtcgggggtgtcgttgtcgttgtcgttttcggagtcgtcgtcgtcgttcgggttcggagtcgttattgttgggagtgaagagtcgagcggcgtcgcggcggttgtaatgtagtaagttcggtttttcgtacggtcgaggggcgaggtttattttcgttttggtttcgttttcgatacgtttcggatacgttttttgatacgttttcgttagagttcgacgcgtagttcgggttagatgttgagttgtagaatcgttcggttttgggtgcgcgatttgtgaagtagatagttgttttggattagggttgcgggttcgcggggtttaaagtggtttgtagaattaaaggtgggtttgtatttgtgcggaaagaaggtacgtagtttttattatttttatggaggtttgtgatttttaaaagtttattttgttggaattttagaattttaaattagaatagtaaagttgaaaaggattttagggattttttttttttttagtcgttaatatattatttttagaagggagttatttagagttatggttatagtttggaattttttttaagtttaatattttaattttttatatttttttgaggggaaaggggagttttaaggggaattaattaaagtgttgtttatggatttattttaaaattattgaattagaggttatattttaataatattattaggtaatttgtatgtttattaaatttgagaagtatatatttaagtattcgatattttttagttttttgaaatatgttatttatattattatttttttttaaatgtatattggatttttttttttaaattttttatattttgtataagacgagtcgtagttattattgtaagttatataaaatgataattttaaaaaataatatgaggttttttttattgttttgtatagagatttttattttaggaagatagtagttaaaagaagaaaaagttttttatgaggttacgatttgtaagttaattataatgtattcgaaatggtaagatatgggtttttggttaggtagttttgtttaaaatggaatagttagttattttattttttaaagaatttaagttatggagttggatatttttttttatttagaagtattgtgtgatttatagttagattttttttttaaaattttttttatttagatgttatttgatgttgagagttttttatagtatgttggaaatgtgttttgggttaaaatagttttgtttttttgttttaaatttaattttatttattattttgatggtttagattttaaaagtggttagtcgtaaatattaagtggagaggtattaaaggtaaattgaaggtgagagtaggtaggtgtattttagtggagagttcgttagaatttttttttatgggtttcgttggttgtttaatatttttaagtttaggttttataaatatggttagatttttatttggaaattagtagtttatttagtttttgttgtttttagggtattttaattatgagttattataattggtttttaataagaatttaatatatatttttttaatagaaattttagaagtagtattatagattaggtaattattagaaaattaatttaaatatatatatatatatatatatatatatatatatatatatatatttaatattataaataatatatattaaagaaggttggggatgttggtttatatttgtaattttagtattttgggaggttaaggcgggtggattacgtgaggttaggagttagtgattagtttggttaacgtggtgaaattttgtttttattaaaaatatagaaaaaaataaaaattagtcggtgtggtggtaggtatttataattttagttattagggaggttgaggtaggagaatcgtttgaatttgggaggtagaggttgtagtgagtcgagattgtgttattgtattttagtttgggtgatagagtaagattttatttattaaaaaaaatatgtatatatatagttatatttatatatatataggaaaatttttaatttagtaaatttattaagggaaattgggaaattgaattaaaagagaaatataataaaaatataattaattttatttttaagaatatttaattttgagtttgtgataaaattgatatatatttgtattgttgttggtattgtaaattagtaagagttaataattagatgtgtatatggtaaaaataagaaagtattttgatttgttttaattgaggaagttatgtatgagttttttaatttttttttatgtttatattttttttatatatttgtgttttatgattttttatggattaaattgtattttgtttttttattaaatttatatgttggagttttaatttttagtattttagaatgggattatatttggaaatagggtttttaaagtaaaatgaggttatacgagtgggttttaatttaataggattggtgtttttataaagagattaggatgtagatatatagagttaggagaagatgattatttataagttatagagtgtgtttttaaaagatattaattttgtttatattttggatttttagtttttataattgtgagaaaatatatttatgttgtttattggtttttttgttatgatattttttagtaaattaatatatagtttagaaaaatgaattgtttaaaaaaagttaatttttttagtaataatggtggtagttggtataattattggggagacgggaaggtaattaagtaatatatatgaataattagtaaatttatatttataagatatttttgaggaaatttttaaatgggtttgaaatttttggttttgttatgtagtgattttatttttttattagagtagatgaaaataataaattaagatgatttttaagaggaatgtatggtaatattaaagttttttattttgaaagaggttgtagagaaagagtaacgtttgtgtattttttgtttagagaatttttgttgagaaatttagtttgtttgttttttatgatatatatgttaatggttagattaaaaatatatttttttttttttttgagatggtgtttcgtttttgttgtttaggttggagtgtaatggcgcgatttcggtttattgtaattttcgttttttgggtataagtgatttttttgttttagtttttcgagtagttgggattataggtatgtgttattatatttggttaattttttatttttagtagagacggggttttattatattgtttaggttggtttcgaattttcgattttaggtgatttgtttgttttagttttttaaaatgttgggattataagggtgagttattgtatttagttttaagaatatattttttattttatattttaaataaagaaaaagtaatttataattggattttattttaggattttaattttagtttttgggaaagaaataaggttagatatttttatttggatggaatagttattagatattttatatagttttagtaattgtttttgagtaaaacgtttatttttaaattgttaagggtttaggattaggttatttagtgacggatgttgtttttttaggtagagagttgtaagttgtgtaggtttttggatgttattcgagtattgaatttaattggaaatatagggtttgtgagaaattttgattagtttatgttattaaagaattaaagttttatttggtttagataaaagaagatgttattaatttttttttttgagatagagttttgttttgttgtttaggttggagtatagtggtatgattttagtttattataatttttatttttaggtttacgttatttttatggtttagttttttaagtagatggtattataggcgtatattattatgtttagttaattttttgtaattttagtagagatggggttttattatgttgtttaggtttgttttgaatttttggtttttggtggtttattcgttttggttttttaaagtgttggaattatagacgtgagttatcgtatttggttaatattattattttgattattaataattatgtatatgtataaagatttataagaaaatgtttatgataatattatttataagagtaaaagaatggaaatattttattttaagttattataaaaggtgaatattatgttattatttatgttagtgaatattatggtttgattaaatataaatatattacggaagtataggattttattttgtaagaattatatttataatttgtttatatattttgtattttgttgttttaattttattggaataaaaaaaaaaaggattgggtatagtggtttatgtttgtaattttagtattttgggaggttaaggtgggtggattatttgaggttaggagtttaaaattaaggtgggtaatatcgcgaaattttatttttattaagaagataaaaattagtcgagtatggtggcgtatgtttgtaattttagcgatttaggaggttgaggtaggagaattatttgaatttaggaggcggaggttgtagtgagttaagatcgtgttattgttttttagtttgggagataaagggagattttattttaaaaaataaataaataatttgaaataataataataaaaagaaataaataagtaaaatatagggaaggaagtttgaagattaattgggaaggagaaaaaggaattttttggggtaacggttatattttatattttgataagagtttgggttatataagggtaagtatttgttaaaatgtagtaaatatatgttaaagatttgtgtattttattgtatgtaaattttatattaaaagaaaaatttgtaaataaatattaggttgagtgtggtggtttacgtttataattttagcgttttgggaggttaaggtagatagattatttgaggttaggtgtttgagattagtttggttaatatggcgaaattttgtttttattaaagatataaaaattagttgggtgtggtggcgtatgtttatagtttcggttatttagaaggttgagtattaagagaattgtttgaattcggga

SEQ ID NO: 419 - DNA, 4233 bp, Artificial Sequence
  chemically treated genomic DNA (Homo sapiens)
  unsure (2320..2321, 2336, 2351, 2363, 2413, 2723..2724, 2726, 3730)
ttttttttttagtcgaagtattttttgttcgttttttagcgtatgggtggcggttacgtgtttagaacgttcggcgttcgtttcgtttttttagttttcgcgcgtttttttggtagttggttatatggtgagggtgggggtgagggggtttttttagtttgcggtttgtgtttatggtcgggttttttgcgtttagttgtttcggatcgagttcgggtgtatggggtcgtaggaatcggtttcggggtttcgataacgggtcgtttttatagtatttcgggttggcgtgaggtaagtgtagtttttttttaggaatgagaattagtgttcgttttttttatagttttttacgcgttcgtttcgcgagttggttatggaagggtcgtttaagggcgggaagtggggtttttgtggttatgggaaagtataattttagggattgaggtgtaggattttcgatgtaaggtatgtgttatgtgtgatttttgtgcggggcgcgattgttttaaaggaaaaagcgttttttattgtagggttttacgtggttggaggggttggtattgagttattgtgttatttttggggtcggttttaaggaagattgggagcgggggatgggatgttggtggtgttttttgcgttttttttttgggagtttttttgttgttgtaggttatattattttaattttgtaagcgatttttggtgataggagtttgtgattgtagggttttttttgatttgagaatggttatttttcgatatgagttagtggttgaaattggtgtcggtgtttatgggatagtgtataaggttcgtgatttttatagtggttattttgtggtttttaagagtgtgagagtttttaatggaggaggaggtggaggaggtttttttattagtatagttcgtgaggtggttttattgaggcgattggaggtttttgagtattttaatgttgttcggtgagaaggtggtggagggttgggcgtggggagtaaagggaaaagatagtttataggtggggtgtgatgatttgtagagaagtggggattttgaggaaataatgagaggttatgttgggttaaaggggattgaaaagtgagtatttattttggttaggttgatggacgtttgtgttatatttcgaattgatcgggagattaaggtaattttggtgtttgagtatgtagattaggatttaaggatatatttggataaggtatttttattaggtttgttagtcgaaacgattaaggtgagtggggttggtaggtattgagaggtggattgggatttttgtagtagaattttttgggattttaggtatggtgtttagtttttagtgtatttgtatttttttttttgaaattaggatttgatgcgttagtttttaagaggtttagattttttttatgttaattgtatcgtttatcgagatttgaagttagagaatattttggtgataagtggtggaatagttaagttggttgattttggtttggttagaatttatagttattagatggtatttatattcgtggttagtagaaagatggtattaaaatgggttttggttgggaataggagagtgattgttcgtagtaattgagaagttatgtgttttatgtgtttagttaagtaagttgtgttttatggtaatttatggggtttttatttattttttttattttttttaggttgttatattttggtatcgagttttcgaagtttttttgtagtttatatatgtaatatttgtggatatgtggagtgttggttgtatttttgtagagatgtttcgtcgaaagtatgggatttatatattttggattattttgaattttttaaatcgtttgtttataaattatatttatattttgtttattttttttttttgagattagggtttgttgtgttgtttaggttggattgtaatggtatgattatagtttattgtagttttaattttttgggtttaagtgatttttttattttagttttttaattagttgatattataggtacgtatttttatgtttggttagtttgttaatatttttatagagatggggttttagtatattgtttaggttggttttgaatttttgtatttaagtaatttttttatttttattttttaaagtagtataagttattgtatttggttttatttttttatttgcgtattattaatttgtttatagtagaaagttttgaaatgttttggaattaggaattttatatttttttattttttttattttttatttatttatttatttatttatttatttattgagataaggttttattttgnnatttaggttggagtntagtggtttaattanagtttattgtantttttattttttgggttaaagmaatttttttattttagttttttgagtanttgagattaaaggtgtacgttattatgattggttttttttttttttagatggagttttgttttgtcgttaggttggagtgtagtagtgcgatttttgtttattgtaatttttattttttagatttaagtaatttttttgatttagttttttaagtagttgggattataggtgtacgttattatgtttagttaatttttgtatttttagtaatgataggttttattatgttggttaggatggtttcgattttttgattttatgatttatttatattagatttttaaagtgttaggattataggcgtgagtnnnngtatttggtatttttttttttttaaaaaaagagataaggttttgtttgtttaggttgatttagaatttttgggtttaagtagtttttttattttagtattttaaagtgttggaattgttggtttttattttttatattttttattttgagttattaagtagtaattatttaattaagatatttttgaaaatgattgttattttatatttttttttattttaggttttttttttgtggaaattttgaagtcgattagttgggtaaaatttttgagtaagtgattaatatgggagaaaaagattttttattttgagttttttttttgttgaatttaggatggtaattggttttgttatggggatgggaattggaggatttttttgattagagtttttttgttttttatagtttgattgggttgtttttagaggatgattggtttcgagatgtatttttgtttcgtggagtttttttttttagagggtttcgtttagtgtagtcggtggtatttgagatggaggagtcgggagtatagttgttgttggtaattggagatggttgtgggtatagggaaagaaatagagattggggaaagaaatagagtagtatgtagggttttggttattgtggttaatgaaatttggttggtagatggtttgtagtttttattatagttgtaaatagttatttatagagaaggatatagaagagaatttattttggttgggtacggtggtttacgtttgtaattttagtattttgggaggttaaggtgggcgtattatttgaggttaggagttcgagattagtttggttaatatggtgaaatttcgtttttattaaaagtataaaaataagtcgggggtggtggtatacgtttgtaattttagttatttgggaggttgagataggagaattattttaatttaggaggcggaggttgtagtgagttgagattatattattggtattttagtttgggtgatagagcgagatttcgtttntaaaaaaaaaaaaaaagaaaaaagaagaaagtttattttaggtattgttgtgggtggtagaagttgttttttttatggttttttgatttttgtttttttttttaggaaatgttgatttttaatttatataagcgaatttttgtttttcgagttttgtagtatttttatttatataaggatgaaggtaattcggagtgagtaatggagtggttgttatggaaggaagaaaagttgttattttttttttggatattgagagggtaatttttgtttttatttttgaggttatggagggtttttttttatttttttatagagattattttgttgttttaatgatattttttttttatttttttttttgaggttttttttttttttttttatttttttatattaaggggtatgtttttttttgtttttttttttatttttatatttggggtttttttttatataggaaaaataaaattaaaagaaawaatggtttttttttttttttt

SEQ ID NO: 420 - DNA, 4233 bp, Artificial Sequence
  chemically treated genomic DNA (Homo sapiens)
  unsure (504, 1508..1509, 1511, 1821, 1871, 1883, 1898, 1913..)
aaaaaaaaaaaaagggttattwttttttttggttttgttttttttgtataaaaaaggattttaaatataaaggtagggaaagggataagagggaatatattttttagtgtagagaaatgggaaggagaaggagaagttttaaaaggagaggtgggaggggaatgttattaaggtagtaaagtaatttttgtagaaagatggaggaggattttttatagttttagagataaaggtaaagattgtttttttagtgtttagaagggaaatggtagttttttttttttttatggtagttattttattgtttatttcggattatttttatttttatgtagataagagtgttgtagagttcgaaaggtagagattcgtttgtgtgggttaaaagttagtattttttgaggggagaggtaaaggttagaaaattatgaagaaaatagtttttgttatttataataatatttgggatgagttttttttttttttttttttttttttttttgnagacggagtttcgttttattatttaggttggagtgttaatggtatgattttagtttattgtaattttcgttttttgagttgaagtgatttttttattttagttttttaagtagttgagattataggcgtgtgttattattttcggtttatttttgtatttttagtagagacgaggttttattatgttggttaggttggtttcgaatttttgattttaggtgatacgtttattttggttttttaaagtgttgggattataggcgtgagttatcgtgtttagttaggatgggtttttttttatatttttttttgtgggtggttatttgtagttgtaataaaaattatagattatttattaattaagttttattaattatagtggttagggttttgtatattgttttatttttttttttagtttttatttttttttttgtgtttatagttatttttagttattagtagtagttgtgttttcgatttttttattttaggtattatcgattgtattgggcggggttttttggggggaaaggttttacggggtagggatatatttcgaggttagttattttttggaggtagtttaattaggttgtgggggataggagaattttggttaggagggttttttagtttttatttttatggtagagttagttgttattttgggtttagtagaaagaggatttagaatagaaaattttttttttttatgttggttatttatttaaagattttgtttaattggtcggttttagagtttttatagaagagaggtttaaggtgagaagggatataaggtagtagttatttttaaagatattttagttgaatggttattgtttagtggtttaaaataggaagtatagggaataaaggttaataattttagtattttgggatgttgaggtgagaggattgtttgagtttaggagttttagattagtttgggtaagtaagattttgtttttttttttaaaaaaaaagaaatgttaggtgtnnnngtttacgtttgtaattttagtattttgggagtttgatgtgggtggattatgaggttaagagatcgagattattttggttaatatggtgaaatttgttattattaaaagtataaaaattagttgagtatggtggcgtgtatttgtggttttagttatttgggaggttgagttaagagaattgtttgaatttgggaggtggaggttgtagtgagtagagatcgtattattgtattttagtttggcgatagagtaagattttatttaaaaaaaaaaaaagttagttatggtggcgtgtatttttagttttagntatttaaggggttgagatgggaggattkttttagtttaggaggtagaggntatagtgagttntaattgggttattgnattttagtttgggtnntagagtgaaattttattttaataaataaataaataaataaataaataaataaaaaataaagagaataaagggatatgaagtttttaattttagaatattttagagttttttgttatgggtaagttagtagtacgtaagtaaaagaatggggttagatgtagtagtttatgttattttgggaggtaggggtgggaggattgtttgagtgtaagagtttaagattagtttgggtaatatattgagattttatttttataaaaatattaataaattagttaagtatggaggtgcgtgtttgtagtgttagttagttgggaagttgagatgggaggattatttgagtttaggaggttgaagttgtagtgagttgtgattatgttattgtaatttagtttgggtaatatagtaagttttggttttaaaaaaaaagaatgggtaaggtatggatgtggtttatgaataagcgatttggggaatttaaggtagtttagggtatgtgggttttatattttcgacgaaatatttttgtaaagatatagttaatattttatatgtttataggtgttgtatatgtggattgtagaagaatttcgggagttcggtattagagtgtaataatttaaagggaataggaagaatggatggggattttatgggttattatgaaatataatttgtttgattgaatatatgaagtatatgattttttaattgttacgggtaattatttttttatttttaattagaatttattttggtattatttttttattgattacgggtgtaagtgttatttggtagttgtagattttggttaggttaaagttagttagtttgattgttttattatttgttattagaatgttttttggttttagatttcggtgaacgatgtaattggtatgaaggaaatttaggttttttagaaattggcgtattagattttagttttaaagggggaggtatagatgtattggaaattaggtattatatttgaaattttagaaggttttattataaaggttttaatttattttttaatgtttattaattttatttattttgatcgtttcggttggtaagtttggtgggggtgttttgtttagatatgtttttaggttttggtttatatgtttaaatattagggttattttgatttttcggttagttcgggatgtggtatagacgtttattagtttgattagagtaaatgtttattttttaattttttttaatttaatatggttttttattatttttttagggtttttatttttttatagattattatattttatttataggttgttttttttttttattttttacgtttaattttttattatttttttatcggataatattgggatgtttaaaagtttttagtcgttttagtaaagttattttacgaattgtgttgatgggaaggttttttttatttttttttttattggggatttttatatttttgagggttataaagtggttattgtggggattacgggttttgtatattgttttataggtatcgatattaattttagttattggtttatatcgagaggtagttatttttagattaagggagattttataattatagatttttattattaaaagtcgtttatagagttaggatggtatgatttgtagtaataaagggatttttaaaaaaaaagcgtaaagaatattattagtattttatttttcgtttttagttttttttggggtcggttttagagataatataatgatttaatattaatttttttagttacgtgaggttttgtaatagaaaacgtttttttttttgggataatcgcgtttcgtataaagattatatatgatatatgttttgtatcgaagattttatattttagtttttaaaattatatttttttatgattataaaggttttatttttcgtttttgagcgatttttttataattagttcgcgaaacgaacgcgtggaaagttgtgaggggggcgggtattggtttttatttttgggaagggattgtatttattttacgttagttcggggtgttgtgggggcggttcgttatcggggtttcggagtcggtttttacggttttatatattcgagttcggttcggagtagttggacgtagagggttcgattatagatataggtcgtaagttagagaggtttttttatttttatttttattatgtgattagttgttaaagaggcgcgcggaaattgggagggcggggcgaacgtcggacgttttgggtacgtgatcgttatttatgcgttgaggggcggataggaggtgtttcgattgggaggaggg

SEQ ID NO: 421 - DNA, 15853 bp, Artificial Sequence
  chemically treated genomic DNA (Homo sapiens)
aagtaatagatatgtgtttatttattaaggatatatttttattgttatgtttatattaaatattggaatatttattttgtggtaaattatttagataatagttttattgaaatataatttagatgttataaaatttatttatttaaagtgtataatttaatagtttttagtatagttagagttgtgtaagtattattataattaattttagattatttttagtagtttaaaaagagattatatattttttagttattattatttttcgtttttttttttcgtgttttaagtaatttttaaaaaattttaggttgttttttaagatttttttattttgaatatttaatataagtggaattatataaatatgtgttttattttagaaggaatattaatttaatattttaaaggtttatttatgttgtagtaggtattagtatttggatttttttttaatggttaaataatagtttattttaaaatagtttattgtgaataaatttttattgtaaatttttttttttttttttaggtaaaaaaataaatagaaataaaagttttaatattttttttattttttaaagtgttagattattgtatgaattttttaggtatatatattttagttgatgatatttttatgatatagtttttggttttatgggggatgtttgtttaaatattaaataataaaatagttattttatgtcgagggtaaaaaggttttttataaaatgatggtttgagaagaggagaatatttattttaaagttattttattaaattttgttttaaagtaatttatattgtaatagggttttgatgtagttatttgtatttatattgatagttggttaattagtattattgagtatttaatagtttataaggttttgagagttaaataatataattatgaaggttataagaagttagataggttaaatatagttttttttgtgatgttggtgaatagttatatatttattgatggattttattttttaatttagatttttatggttagaggtatatttagtgtttttataggttgtgatttattaaggattataattttttttttataagtgtttattattatagattttgtgttatattgtttaaggatttattgtttttagtttttggaaatttgtttgatattatttagttagtaatttttttgggaattattttggtagaagagagttatttttgttttatttatggttatattttttattaggggtagattacgtttaatgattggttaataaaaaaggtttggttttttattttaatttaagataattttgaaaggtttttttatttttagaatttgtaatagggttagttgatatttttaataatattgtattataaattaatttttttttttgtttaattttggttatttttttatttattattggagttaattttgagtgtattttttaataaattttttatatgtaaatatttatttgggagtttgatttttaaaaattttaatttgttttatttatggaattttttaattgtttattagaatagtttatttgaggttgagtatttgatatatagagaaagaagtataataagagaatataagtgatttagttagtaagttttattaattatggaaaattattgatattttaaatttttatataaagattttttagtgtttttttaaattttatttttgatgttattatgatatgatttggtagtgtttttataaaaattttattttgaattgtaatttttataatttttatatgttatgaaaggtatttggtgggaagtaattgaatcgtggaggagggttttttttatgttatttttgtgatagtgattaagttttatgaaatttgatggttttataaagggtagtttttttgtatatatttttttgtttgttgttatgtaagatgtgtttttgttttttttttattttttattatgattgtgaggtttttttagttatgtggaattttgagtttattaaatttatttttttttataaattatttagttttaggtatttttttaaagtagtatgaacgtggattaatatatattatatttatatatttattttagatgatttttatgtttttgtaaagattttattgagtttaaagtttaaggtgttatagaatattttaaaataggttttatttgagttgaggattttttatattttattttatggtgtttaggttttttaagattttatatttatgattttgaatattttttttttttttataattgaatgattaaagtggaagtgaggatgatgattgagatagaagtataaattatttaatttaatttggattaagtttgagttgagatgtatttaatttaagtaggttttttttggtttttaaagaaaattttgttgttgttgttttttttatttgaagagttaaaaggattttataggcggtattatagaaaaaattagggtttaggttagaaagagggtttatttaattagtgtaatatggtataggtagattataaaattagtttttattattaggaaggtttaaggttattgttgaaatagttttaagtattagtttaagggtgagataaggaaggagatagaataaggatttaggtagatagttgagaaaataaggtatttaatagaagtagatatttggtataatttaagaaatgtggtttagaaatttgtttgtgaatggtatataggtgttggagtttttttttttagattgtttggtgtatatagtagggattaatgtattaattttatgtatgttttggattggaaaattttttaatttttatttttttttttttgtatttatttttttaaaattttatttattaaaattgatagtgtagattggtaggtcgagaatgtgatggtaaagagaaagttgtaagtttttttgaatggttaattttaattatatatgtatttattatttgtatatttttttttttttttggaggggggatagagttttattttattgtttaggttagagtgtagtggtgtgattttagtttattgtaattttagtttttcggatttaagtgatttttttgttttagttttttaggtagttgggattataggtttttattattatatttggttaatttttgtatttttagtagatatggggttttattatattgattaggttggtttcgaatttttgattttaagtgatttgtttattttagttttttaaagtggtgggattataggcgtgagttattatgtttagtttatttgcgtatgttttttattgtcggaagaaggaatagtttttttatatattatattttagggtattttatgattatataagaatataatttttttgttataggtaagcgtaatgtattaggaaataggttgcgggtaaattattgttttttttttgttattatgatagaaatattatgataggtagttttgtttttaaattttgtaaaattttaatgtgtattttaagtttgtattgttttagtttatgatggaattgataggttggggaaaatggaaagtaaagttttattagtttggatcgttttttgtagtgtttttagtgagattatagttggagaggtaaggatgtaatttatttaaaatttaaggtttatggttaaagttgatgattaataatatagaattgtaggtttgggttttttgtttttttaaaaaattttgttaggtttggaaagggatttttaatttaattttgagatattataggtaatgtttaattgttttaaggtgtgattaaaattttttttttgtttgttttttgttgttgtttgtttgttttgttgtgttttgagatggagttttgttttgttatttaggttggagtgtagtggtataatttcggtttattgtaatttttattttttgggtttaagtgatttttttgtttcgttttttaggtagttgggattataggtatgtgttattacgttaggttaattttttttttttgtatttttagtagagatggggttttattatgttggttaggttggttttaatttttgattttaagtgatttgtttatttcggttttttaaagtgttgggattatagatatgagttattacgtttagtttaaaattttttaaaataaatttgttgttattttttttttttaatttaaaaatatttttataggttatatgagagtttttgaaaaagtagttatgtttggtatggaaataggttttaaatatgttaatatttgtatttttttttagattttagttttataattttggatttttaatagattaagaattattggtttaaggtttttaaagttagggtagattttttttttaagtgatagttataaatttaacgttgtattatattttatttaaagaaaagataaaagtaaattggtttggtatagtggtttatgtttgtaattttagtattttgggaggttaaggtaggcggattatgcggttaggagttggagattagtttaattaatatggtgaaatttcgtttttattaaaaatataaaaattcgtcgggtgtggtggtgtacgtttgtaattttagttatttaggaagattgaagtaggagaattgtttgaatttgggaggcggagtttgtagtgagttgagattgtgttattgtgttttagtttggatgatagagtaagattttgttttaaaaaaaaaaaaataaaaaataaagataaaagtaaattgaaaataaggatagaaatgtttgttaatatgttttgtgattttgattaatagtttttttcgtttttggttttggtgttttaatttaaatggggaaattgtgattttttttagtttaaaatttatatgatattatttatatattaaatttgttttacgttttttggaaattttattatttatgagtgtggttttttttttttttttaattttttaattaaatagttttttttttataggtttttgaagtggtagtagttttttttaatttttgttagaaatagttttttttaatatgagagttgtatttttttttttggttagggtagtaagttttagttttggttttttgtttttgttttttttttggttagatcgaagtgtattagttaaggagttgaagtttgtgattttggtaagtagattttttttattgttttttttttaaaattgtgtttttagtaaagtttgataaggtaagcgttaggttttattttatttttggattgttttttagagattaggttttgtttaaatttagaaagtgaataattaagttttgtaagttttttttaatgaagatttaacgtgttttaataaaaatattttttggtcgttgtttttttaggggttgttttttatttgtttttgttgatgttatttatttatttattttataattgttttgaatttagattttttttgatagttatattagtttagaagaaattatagttggcgttgtttatgtattaagagttggttttatttaatttaattattatttgtttgtaagttaaaaaatagttattttttgaattaagtagtttttttatttttgtttattaggaaattagaataattatttgtaaataattttgaagtataaaagtgaatttaaatttggaattttaggatgattttttgatatatagatttagttgacgattaaaattattggtatatgtgattagttatgaaaaaaggtggggggtggttgatgtataatattaagaaaagaaaatatattgttgatattgtttgaaaatagatggaaagagggtttgtaaagtgaaggggatttattatgttatttaagagtttgattttttgtttttgtatttttttttttttttgttttattttttttttgtttttaagtttttaagttgttttttgttttttttttttcgtttttttttttttttttatatttttttatttgagatagtgaaagtgggttgataagtaggtaaattttttttttgttaagaatatttaaaaattatttttataatttgaaggaaagttattgtttttttaaaaattaaagtttaggttttttttttttttagtatgggatatttaaagttttttattttttatagaaaatatgatatttatgtgtttatttgaattattatttttatagtttagtaaatttttattaggttatgagttaataatgatagaaaatttagtgaaataaattattaatttatttataaatgatttattagttgttagatttttgtgtagaaaaaaaatatataatattgtgtgttttttttagggaaatttatgtgagttaggtttgtatttttattagtagtttttttgttaatatgtgtatgaggtaagtttagggattgtagaaattgtattgtatttgtcgtgtttgtaatattgtaaatttgtgataagttggttgagtggtagttttttgagaaatttaagttattttaagtttattgtatatgatgtatttttttttttatgttttatttaagttagtttaggttaattttttttgattattaaattgttgtgggttttttatatttagggattgtaagttaatttttttttgaggaaagttaaaatataaagttagtttttttagaattaaaaaaattaataaatattgtataaagttagtgttaattatttttttttattatgatttttttttattaatggtagatgaagggttatttaatatattttttttggtttttataaaataacgtttatttaagtatttaagttaataaatattagttttttatttttattgattaaagagaatatttgattataagtggttaatttatataaatgagataatttttagaaaattattaggagaattagaattgttttaaaagatgtttataattaaagtggtaatattaatgataataattaatagttaattgagtgtttattgtaagtatttattgtaattgagtgtttataaggtattgttttgagtgtttaatatgaattgtattatataagtttgttaataattttttaaaataaggtcgttaaataaaatatgggatgattatttgaatttgaattttagataaatagtaaataattttttagttttatgtaatatttgggtattttgtatgtttatttgttaaatttggtaattattttataaagttttgtaaaatttattatttttattttatagatgaagaaattgaggtataaaaaggttaagtattttgtttatggttatatagatggaatggtggagatagaatttgaatttaggttttttgatttcggatgtttttttttttattattagatatggtttttttttgttgtgtgtatataatttagtatatggagttagtttgagatttttttgtaaggtttgttggattagtttgattttgaattagtaggtggtttttttgttttttttttgtgattcgagaaaaataaattttttttaattttgaaaagttgtttttagtagaaagaggaggaaattgtttttggtttttgttttcggattaattgaagtgtttgtgatttatgaaatgttagtttgataagttgttaataggtgtatatggggaaaaaattagttttaatagttaagttagttttgggaatagaattgggttaaattgtgtttaaaaggtttttttaatgtagtaattttaagtttttaatatgttaatacgtattgtggtttttaaggaaaggatttagtgttttttaaattttgtttttaaaattttgattatagtatttatttttttttttttttttttaatgttttgtagaaaatattgagagaattgatatttttaattttatatggaaagaatcgtaaatatggtgaatttggatgtttttattaattagttttaaagattattatttatgtaattttgttttatttgtatagttatttattttttatatatatttatttgagttttttaagttattttatgtattatattatttagaaatagaaaaatgttattttaaagtattttgttttttttaatttagagaaaatttataagtttagttgatttaagatagaaaaattttattttattttatcggtgttaagaaaggaatgatgatttataaggtatatattttttttattttttatggttgattttttttatgtagaatttttaattaagtaatataatatttttgggttttttttttttttttgagatagagttttattttgtcgtttaggttggagtgtaatggcgtgattttggtttattgtaattttcgttttttaggtttaagtgattttttagttttagttttttaagtagttgggattataggcgtgtgttattatgtttggttagtttttgtatttttaatagagattgggttttattacgttggttaggttggttttgaatttttgattttaggtgatttattagttttggttttttaaagggttgagattataggcgtgagttattgcgtttggtataatatgatatttttgatggaagtagtttttaaatttttagtatataatttatatattggaatgggtaatttttatattatggatatgaaggattttttagttattagggaaggtggagttagaggattatttgagtatagtagtgtgaggttatattgagttaggattatattattgtattttagtttggataatagggaaaaattttgtcgtttgggttggtttataaaaagaggtattagaggttgggtgtagtaatttatatttgtaattttagtattttggaaagtcgaaatagaaggattgtttgaggttaggagtgtaagattttaggttggttaatatagtaagattttatttttgtaaaaaagaaaaaaaaaaaagatggattagataaaattttattgaaaagtaaaaattaggttttttgttttagtttataaataattttatatataattttttttttttgttgtatggtttttaattattgtatttaaggaatagttaagttgtttggagattataggttttttaaagatatttgtcggaaatagtatcgtgcgttgagagttggtattgagttaggtttagtttagtttgtttatatgagtttttttttagatttatgttaatgtattttataaatttttagggtgtatttggttaagatattttagttaattaggttatttttgtgggtgttttttagtattttaaatgtaaaggaataattaattattttttttagttaaggaaataaaagtagggagagatgattagaaattaatagaggtatgtttcgaaggagagtgttgttttttattgtttaataggtagtgtttatttgttttatatgttgtaaattattgttagtaggaaaggaagtatatatgttagttaagttaaatgtttgaataatataataataaaaataattataataaatataataataaattttatatattaaatgtattcggtgtgttcggtattatattgatggttttatatatattatatatttaatttttatgatgtttttggatgagaaataatgtttttgtgttttatacgaaaggaaattgaggaaaggaaagggaaattgaggtatgtagaatgttaagttaaattatttttttaaggttatttagtaggattttgataaagtaggagtttgaatttaggtttaattaattgaaaatttagattttttttgatatattatatattttttatataatataatatatagtttttatagttttttttatttgtaggtttttgtgttcgttttagtttttggattaaagttttattagatttgttttgattgttttacggggagtatagaatatatttttatgttgattttttttaaggttagttagttttttttttaatttttgaaatgatatttatttatattatttaattatttttgtttaaattattttatttttaattttttttattaatggatttattttttaggttttaaaagaagaaaataaaatagatttttatttatagttatttttgtgtattacgagatttttataatttagagtatattttaataaaataataagaagaatttaatgttaggagataaggttttttttaggatttttagaattattttaaagttttatgatgtgtttttaattttaaatttgaaaggagaatatgatggtttatgagattttaatttagtttggaagtagatttattgttttagaagtaaaggtataaatgaataggatagagattgttataatttgaatgtttgttttttttaaaatttatgttgaaatttaattttaatgtaatagttttaagaggtggggtttttaagaggtgattgggttatgggggttttatttttttgatggattaatggattaatagattaatggattaataggttattatagaagtgggtgagttattatgttagtgagtttattataaaaattattttggtttttagtgtgtttttttttgttttgttatgttttttgttatgttatgatatagtataaggtttttattagaagttgattagatgtagttgtttgattttggattttttaatttttagaattgtgagtaaaataaattttttttttttataaattttttagttttaggtattttgttaaagtaatagaaaatgggttaagatagaggggaaagataagaagatgaaagaaaggaaaaaaaaaaagtatatatagtatattttgttgataaataaggatgatgattaaaaatttttatgaaatgagaagattggaaagaaatttataatgtatttggaagtattagatttaattcgagatttatttgtttattagaataggttttttttgtatattattatgttttaggtattgttttggggttatagtagtgtttgtgatagtaaggtttttgtttttaaggagtttttagggatagggagggagttagattttttttaattttagtaaaaataaaaaataagaaaatattaggaatatttatttgaaataaaatagtgagataagatagagattgagtaagaattataatgatggttaagggatgtttttttgtaaaggttaaatttttaggatagattttaaattgatgagtggtgtgtatgttgagagaagacgtagatttgagatatttaaagtagataggatattaagagtaaaggttttgaggttttagtaaatttagtatattggatgtaatagtaggagggtttatgtgggtaagttgaggatattaaggtgagaatattaaggtgggtagggattagattaggtaagattttgtgagtttttgtaaggatttttaatttatgtaaagagtaatagaatatgatataatatttaagagtgatgaggatataaaagaaataagattagttatatataagttgataattgttggagatagtggtgggtttatgataaaaatttttatttttaggttgggtatagtggtttacgtttgtaattttaatattttgggaggttaaggcgagtggattatttgaggtcgggagttcgagattagtttggttaatatggcgaaatttcgtttttattaaaaatataaaaattagttaggcgtggtggtaggtgtttgtaattttagttatttgggagggtgaggtaggaaaattatttgaatttgggaggtagaggttgtagtgagttaagattatgttattgtattttagtttgggtaataagagtaggattttattttaaaaaaaaaaaaaaaaaaattttatttttgtatatttttatattttttattggatatagtttcgattgtatttattaggttttttatattttaagttatatgttagatttgtttagtagatttagtggagtaggtttatttatgggggtattaaattaaaagtttttttaaaaatagttatttatgatttaaaagtgtgaagtgattgtagtatgatggggaaatagtgggttaattattatgagaattaggagatttggatagttatatgatttttttgattatatagtttttttatttgtttagtgtagtagtagtgttaatttgtttttagacggggatgtaataattaaaagaggtagtaggggaaaattttataaattatggagggttgtgtaaatgtaaggaattattatttttttttatttttatttatttattttgagacggagttttattttgttattaggttgaagtgtagtggtacgatttcggtttattgtaatttttgttttttaggtttaagtgatttttttgttttagtttttcgagtagttgggattataggtatgcgttattatatttagttaatttttgtatttttagtagagatggggttttattatgttggttaggatagttttgattttttgattttatgattcgtttgttttagttttttaaagtgttgggattataggtatgagttattgtgtttggttaggaattgttattattttggatgtttttttattataattattattattattgtaaaaattttaattgttaataaagtatttttaggtttttaaaggattttatagagtatgattgttggattgagtatagaggtaataattggtagagtagtagttaagaagattgttttattatagaattaaaagaatgttttcgtatagtttaagaattttagttgaattttgaaattttaaaagtttaaggaatattagttttatatttgtttgcgggaggggtgtgtgtatatattttgatttttagttttggaagtggagaatggtttattaagtgtttttttaggatattttttttaaagggttgatagtatgtttgagtaattattttggaaatatttaaaatttattgaaatgtaggggagtataattatttttgaattatgggttagagtgagaaagtttgtttaagttttatgattatgttttagttttttgttttttaaaatattttgttaaggtgattatatttgttttttttttttaggttattttgttatttagttgtataattttagttttatttttttaataatatatatagtttatagtgttttcggggtagttttcgtattaaggttttggttttttttgatataaaatatatatatatatatatatatattttttttaattttagaggaaaagagtatattaagtagagttaataaagaagcgttagattttagattatttagatttagttggtgggattgtgaggagtgtgattatatagaaatgaattttttataggtggttaagtatgttggagttggaggtatagtttgtgtttgaatattagttttattattttttatatgttgtgtgagtttagataggttatttaattaagttaaatttttttatttgtgaaatggaaataataatagtaattgttttgtggaattgatgagaagattatatttatgagaagtatttagtatagtttttaggataaagtgagtgtttaaaaaatgttaaggagttatcgttgtggttataggttggtgggaagtaatgtaaattattttattataatgttttttatttgatttttttttggttaatttagtggtttttaatttggggtgattttttgtttttatggtagaaaatgtgttttttttagttgttatagttggggaatgttattggtattcggtgggtaaaggttagggatgttgttagatattttataatgtataggataatttttataataaagaattatttagtttaaaatgttaataatgttgaggttgagaagttttagaaattaaaatagtgtggggtttgtaatttattgaaattatgtaataattttagttatttaaagatatatttatttgggatataaaaattttaaaatgtattttaattgtggaaagaggtattaatgattaattataattatttttgattatgattaagttatttttgagattagtaattgtaggtgtttataaaaaaatatgtagttgttttttttgtttttaggggattatttatgaaagtaattttttatttgattaaaatgatcgtttaatatttattgtattattgtttttgtttttgtagattattttatcgaagttttaatttgttattagtttaaagggttaaaagatttgttttttttagatattagagatataaattaagtattttttatttttttggaatttttttttaaaaatgattaaagtttgagattgtttttttatttaatgtttattgaattttgttttatagaattttaaaagagtaggtttttagtttattttttaatggaatattttagttaggtagtataagtataggtgcgggtaattttagataaattaaggtgttatgtagttgtttttatattaaaaatatttgttgatattagtgtagattttattttgtagttttttagtgttttttttttttattttttgtttataagatggttttgtgtttggtttgatattatattgagaaagtatattagaattaaagtattaagattttaaaagtttagattattttttttaaagagaaatgtgtaattataatagtatgatatgggtataaatatagaagtatgttattaaagtattgagaattagtttttttaatttttttatttgtaattttttatttttaatttttaaaaaatgaataaattattggtttaaaatggttataaattgtatgtggtgttaaaaatttattatttttattgtatataaaatgttgttaggtgtggtggtttatgtttgtaattttagtattttgggaggttaaggtaggtggattattaggttaggagtttaagattagtttggttaatatggtgaaattttatttttattaaaaatataaagattagttgggtgtggtggcgtgtgtttgtaattttagtttttcgggaggttgaggtatgagaattatttgaatttgggaggtagaggttatagcgagttaagatggtgttattgtattttagtttagatgatagagtaagatttagtttcgaaaaaaaaaaaaaagttatattagttgggtacggtggtttatatttgtaattttagtattttggaaggtcgaggtaagtggattatttgaggttaggagtttaagattagtttggttaatatggtgaaattttatttttattaaaaataaaaaaattagttgggcgtggtggtaagcgtttgtagttttagttatttaggcggttgaggtaggagaattgtttgaatttgggattcgttattgtattttagtttgggtaatagagtaagatattgttttaaaaaaaaaaaagttatattattattattgtaattattaagggaagaatattttttattagagtttgtttgtagtaaagtatttttgttagttttgtgtttttttttgttttattttatgtataaatcgatttttattatgtgttatttgttttttaatggttgattattttgatttttatattatttgaaatatagtgaaagtgttagtgaatttagaatagtggtttttaattagagatttatttagggagattttttaaattttgatgttttggttatattttagattaattaaataaaaattattaaggttgaaagttagtttttagaattttttaaaattttttacgtgattataatgggaagttaaagttaaaattaatgagttagaaaaaaaaaaattattataatgagtagaagtaaaatatttaagtgacgtttgtaatattatttttttatatttatttttagg

SEQ ID NO: 422 - DNA, 15853 bp, Artificial Sequence
  chemically treated genomic DNA (Homo sapiens)
tttgaaagtagatgtgagagagtgatgttataaacgttatttgggtgttttgtttttgtttattataatagtttttttttttttaatttattggttttaattttggttttttattgtaattacgtaaggagttttaaaagattttgaggattggtttttaattttagtgatttttatttaattagtttgggatgtggttaggatattaggatttaaaaaatttttttgggtaaatttttagttaagaattattattttaagtttattaatatttttattgtgttttaggtaatgtaagaattaagatgattagttattagaaggtaggtgatatataatggagatcggtttgtatataagataggatagaaaggaatataaagttgataagagtattttattgtagataaattttgatgagaagtattttttttttaatgattatagtaatagtggtataatttttttttttttgaaatagtgttttgttttgttgtttaggttggagtgtagtggcgaattttaggtttaagtaatttttttgttttagtcgtttgagtagttgggattataggcgtttgttattacgtttagttaatttttttatttttagtagagatggagttttattatgttggttaggttggttttgaatttttgattttaggtggtttatttgtttcggttttttaaagtgttgggattataggtgtgagttatcgtgtttaattagtataatttttttttttttttcgagattgagttttgttttgttatttaggttggagtgtaatggtattattttggttcgttgtagtttttgttttttaggtttaagtgatttttatgttttagtttttcgagaagttgggattataggtatacgttattatatttagttaatttttgtatttttagtagagatggggttttattatgttggttaggttggttttgaatttttgatttagtgatttatttgttttggttttttaaagtgttgggattataggtatgagttattatatttggtaatattttatatataataaaaataatagatttttaatattatatataatttgtgattattttgagttaatgatttgtttattttttggagattaggagtaaaagattgtaggtggggaggttaggaaagttaatttttaatattttaataatatatttttatatttgtatttatgttatgttattgtgattgtatatttttttttgggaagagtagtttggatttttgaaattttggtgttttgattttaatatgtttttttagtataatattaaattaaatataaagttattttatgagtaaaagataaggaaagaaaatattgaagaattataagatgaagtttatattgatgttagtaaatatttttaatatagagatagttgtataatattttgatttatttgaggttattcgtatttgtatttatattatttggttaaaatgttttattgaaaagtaagttaagaatttgtttttttgaaattttgtaaaatagaatttaatagatattaaataagaaaatagttttagattttagttatttttgagaaggaattttaagaaagtgggagatgtttggtttgtgtttttaatatttgaagaaaatagattttttggttttttaaattagtgataaattaaaatttcggtagagtagtttatagaaataggggtaatgatgtaataaatgttaagcgattattttggttaggtgagaaattatttttatgaatgattttttgaaggtaggaaggatagttgtatatttttttgtgagtatttgtagttattagttttaggggtgatttggttatgattagaaatgattatggttaattattgatgtttttttttataattgaagtatattttagagtttttatattttaggtaaatgtgtttttgaataattaaagttgttatatggttttaataaattataaattttatattgttttagtttttagggttttttaattttagtattgttgatattttgggttagataattttttgttgtgggggttgttttgtgtattgtagaatgtttagtagtatttttagtttttatttatcggatgttagtaatattttttagttgtgataattgaaaaaggtatattttttgttataggggtagaaaattattttaagttgagagttattgagttagttaaagagaagttaggtgagagatattgtaataaaataatttatattgttttttattaatttataattataacggtaattttttaatattttttgaatatttattttgttttggaaattgtgttaagtgttttttatagatgtaatttttttattagttttataaagtagttattattattatttttattttataaatgaggaagtttagtttaattaagtgatttgtttaaatttatatagtatgtaagaagtggtagagttgatatttaaatataggttgtgtttttaattttagtatatttaattatttgtgagaggtttatttttgtatgattatattttttatagttttattagttaaatttgaatggtttgggatttaacgtttttttattaattttatttagtatattttttttttttaggattggaaggggtgtgtgtgtgtgtgtgtgtgtgttttgtattagaagaaattaaaattttgatacggaaattatttcgaaggtattgtgaattatgtatattattgaaagaatagaattgaggttatgtaattaaatgatagaatggtttgagagagaaaaataagtgtggttattttagtagagtgttttgaagagtagagaattggaatataattatgagatttgggtaaatttttttattttggtttatagtttagaaataattgtatttttttatattttagtaggttttaagtgtttttaaggtagttgtttaaatatgttgttaattttttggaagggatgttttggagaaatatttaataaattattttttatttttagggttggaaattaaaatgtgtgtatatatttttttcgtaggtaaatgtgaagttggtgttttttgagtttttggagttttaaaatttagttggagtttttggattatgcgaagatatttttttaattttgtggtagagtaatttttttaattgttgttttattaattattatttttgtgtttagtttagtaattatattttatgaaattttttaaaaatttaaaaatattttattagtaattaggatttttgtagtagtagtggtaattgtaatagaaagatatttaagataataataatttttggttaggtatagtggtttatgtttataattttagtattttgggaggttgaggtaggcggattatgaggttaggagattaagattattttggttaatatggtgaaattttatttttattaaaaatataaaaattagttgggtgtggtggcgtatgtttgtagttttagttattcgggagattgaggtaggagaattatttgaatttgggaggtagaggttgtagtaagtcgagatcgtgttattgtattttagtttggtgatagagtgagatttcgttttaaaataaataaataaaaataaaaaaaaataataattttttatatttgtataattttttatggtttgtagaatttttttttgttattttttttaattattatattttcgtttgaggataggttggtattattgttgtattgagtaagtaagaaaattatatgattaaagagattatgtagttgtttagattttttaatttttatgatagttggtttattgtttttttattatattataattattttatatttttaaattataggtaattgtttttaaaaggatttttggtttggtgtttttatgaatgaatttgttttattgaatttgttaaataaatttggtatgtggtttagggtgtggagaatttggtgagtatagtcgaggttatatttagtggaaaatgtaaagatatataaaagtggagtttttttttttttttttttgagatggagttttgtttttgttgtttaggttggagtgtaatggtatgattttggtttattgtaatttttgttttttaggtttaagtgatttttttgttttatttttttaagtagttgggattataagtatttgttattacgtttggttaatttttgtatttttagtagagacggggtttcgttatgttggttaggttggtttcgaattttcgattttaggtgatttattcgttttggttttttaaagtgttgggattataggcgtgagttattgtgtttagtttaaaagtggagatttttattatgagtttattattgtttttaataattattaatttgtatgtggttagttttgttttttttatatttttattatttttagatattatattatgttttattgttttttgtataaattaaaggtttttataagggtttataagattttatttgatttggtttttatttattttgatatttttattttgatgtttttagtttatttatatgggtttttttgttgttatatttaatatattaaatttgttgaagttttagggtttttgtttttgatgttttgtttgttttgaatgttttaagtttgcgtttttttttagtatatatattatttattaatttgaggtttgttttgaaaatttgatttttatagagagatattttttgattattattataatttttgtttaatttttattttattttattgttttattttaaataaatatttttgatgtttttttattttttgtttttattaaaattaaaaaaaatttggttttttttttgtttttagaaattttttgaaagtagaagttttgttgttataagtattgttataattttaaaatagtgtttggaatatagtaatatgtaaaaaaggtttgttttgatgaataggtgaatttcggattgggtttagtatttttaggtatattatggatttttttttaatttttttattttatgagggtttttgattattatttttatttattagtaaggtgtgttatgtgtgttttttttttttttttttttttatttttttgttttttttttttgttttagtttattttttgttgttttaatagaatatttgagattgggaaatttataaaggaaagaggtttattttgtttataattttagaggttaggaagtttaagattaggtagttgtatttagttagtttttggtgagggttttgtgttgtgttataatatggtagaaggtatgataggataagaaggggtatattgagagttaaaatggtttttatgatagatttattgatatgataatttatttatttttgtgataatttattaatttattaatttgttaatttattaatttattaggagagtagagtttttatggtttaattattttttaaaggttttattttttaaggttgttatattgggattaagttttaatatgagttttggaggggataaatatttaaattgtagtagtttttattttatttatttgtgtttttgtttttagaatagtgagtttgtttttagattggattgaagttttataaattattatgttttttttttaggtttggaattggagatatattataaaattttggggtgattttggaagttttaaaaggaattttattttttgatattaaattttttttattattttattagggtatattttaagttgtgaaaatttcgtgatgtataaagataattatgagtagaagtttattttattttttttttttaggatttaagaaataaatttattggtaaagaaaattaaaaataaaatagtttgggtagaaataattgagtaatgtaaatgagtgttattttagaggttagaaggaaagttggttgattttgaaaggaattagtatgagaatatgttttgtatttttcgtgaagtaattaggataagtttaataagattttgatttagagattgggacgaatatagaggtttgtaaataagggaagttgtaaaaattgtgtattatgttgtgtagaagatgtgtgatatattagaaaaggtttgggtttttagttggttagatttgggtttaaatttttgttttgttaaggttttgttgggtgattttgggaaaatgatttaatttaatattttgtatgttttaattttttttttttttttttaattttttttcgtgtaaaatataaaagtattattttttatttaggagtattatgaaaattaaatgtgtaatatatgtaaagttattagtataatatcgagtatatcggatgtatttgatatgtgggatttattattatatttgttataattatttttgttgttatattatttagatatttagtttagttaatatatatatttttttttttgttgataataatttgtagtatatagggtaaatgagtattatttattgagtaatgggaaatagtattttttttcgagatatatttttgttaatttttaattatttttttttatttttatttttttggttgagaggaataattaattatttttttgtatttaggatattgagaagtatttataggaataatttggttggttgaaatgttttggttaaatgtattttgaaaatttgtgaaatgtattggtataaatttggggagaagtttatgtaagtaaattgaattgagtttggtttagtattaatttttagcgtacggtgttgttttcggtaaatgtttttgaaaaatttgtggtttttagatagtttggttgttttttggatatagtgattaggagttatatagtaagggagagagattgtatgtaaggttgtttgtgaattgaggtaggagatttgatttttgttttttagtggaattttatttggtttatttttttttttttttttttttgtagagatgaggttttattatgttaattagtttggagttttgtatttttggttttaagtaatttttttgtttcggttttttaaagtgttgggattataggtgtgagttgttgtatttagtttttggtatttttttttataagttaatttaagcgatagggtttttttttgttgtttaggttggagtgtaatggtgtgattttagtttaatgtggttttatattgttgtgtttaagtgattttttagttttattttttttagtagttaggaggttttttatgtttataatgtggaagttatttattttagtatatagattatgtgttgagaatttggaggttgtttttattaagaatattatattatgttaggcgtagtggtttacgtttgtaattttagttttttgggaggttaaggttggtggattatttgaggttaagagtttaagattagtttggttaacgtggtgaaatttagtttttattaaaaatataaaaattagttaggtatggtggtatacgtttgtaattttagttatttgggaggttgagattggagaattatttgaatttgggagacggaggttgtagtgagttaagattacgttattgtattttagtttgggcgatagagtaagattttgttttaaaaaaaaaaaaaaaatttaagaatattatattatttgattaagaattttgtatgaagaaagttaattatgaagaatgagaagagtgtatattttgtaagttattattttttttttaatatcggtgaaatgagatggaatttttttgttttggattagttgaatttgtgggttttttttgggttaggggagataggatgttttaaaatgatatttttttatttttggatgatatggtgtatgaaataatttaaaaaatttaagtgggtgtgtgtgggaaatgagtggttatgtagatgaaataagattgtatgggtgatagtttttgaagttggttgatgaggatatttagatttattatatttacgattttttttatataaagttaaaaatgttagtttttttagtgttttttataggatattggggaaaaaaagagggaggtgaatgttgtaattaaaattttgaaaatagagtttggaaaatattagattttttttttgaaagttatagtgcgtattagtatgttaaagatttaggattattgtattaaagagattttttaaatatagtttaatttagttttatttttaaagttaatttgattattgaaattgattttttttttatgtatatttgttaataatttgttaaattagtattttatgggttataggtattttagttagttcgagaataagaattaaggatagtttttttttttttttgttgagaatagttttttagaattggggaggatttatttttttcggattatagaggaaaagtaagggaattatttgttgatttagagttaagttaatttagtaaattttatagggggattttagattagttttatgtgttgggttatatatatatagtaggaaaagattatgtttagtgataaagggaaaggtattcggggttagagagtttgggtttaaattttgtttttattattttatttgtgtgattatgggtaagatgtttaatttttttgtgttttaatttttttatttataaaataggaataataagttttataaaattttatagaatggttgttagatttggtaaataaatatataggatgtttaaatattgtatgggattaaaaaattatttgttatttatttgaagtttaaatttaaatggttattttatattttatttaacgattttattttagaggattgttgataggtttatgtgatataatttatattgaatatttagaatagtgttttgtaagtatttaattgtagtaagtatttgtagtaagtatttaattgattattggttattattattaatattattattttagttatgggtattttttaaaataattttggtttttttaataattttttaagagttattttatttgtataaattaattatttatagttaaatattttttttagttaataaaaataagaaattgatgtttattggtttaagtatttagatggacgttgttttataagggttaagaaagatgtattaaatggttttttatttattattaatggaaggaaattatggtaggaaaaaatagttaatattggttttgtgtaatatttgttaatttttttagttttaagagagttagttttgtattttggttttttttaggaaagaattaatttgtagtttttgaatataggaaatttataataatttggtagttaaaggaagttagtttgggttaatttgggtaaaatatggaggagggaatatattatgtatagtgagtttggagtaatttggattttttagaggattgttatttaattagtttgttataggtttatagtattataagtacggtagatgtagtataatttttatagtttttaaatttgttttatgtatatgttagtaagaaaattattgatagaagtataagtttagtttatatgggtttttttaaagaaggtatatagtattatatattttttttttgtatagaagtttgatagttggtgaattatttgtaaataaattgatagtttgttttattgggttttttgttattgttgatttatgatttagtaaggatttattggattataagaataatgatttaaataagtatatgggtattatattttttgtagaaagtaaagagttttgaatattttatgttgaaaaaaaaaaaagtttgaattttaatttttaaggaaatagtgatttttttttaaattataaaaataatttttgagtatttttgatagaaagaaaatttatttatttattagtttatttttattattttaaataaaaaaatgtagggaagagaaagaaaacgagagaggaaaggtaagaagtagtttagaggtttagaggtagagaaagagtgaaatagaaggaaaaaaagatatagaaatagaaaattagatttttaggtaatatgatgaattttttttattttgtaaattttttttttatttatttttaaataatgttaatagtatattttttttttttgatattatgtattagttattttttatttttttttataattggttatatgtgttaatgattttaatcgttaattaaatttatatattagaaaattattttaaaattttaaatttagatttatttttatgttttaaggttgtttataaatagttgttttaattttttgataaataaaggtgaaaggattatttaatttagaaaatgattgttttttggtttgtaaataaataatgattaaattgaatgaagttagtttttggtatataaatagcgttagttgtggttttttttggattggtgtggttgttaaaaggaatttgaatttaaggtagttgtaaagtaagtaaataaataatattagtaaaagtaaataaaaagtaatttttaaaaaaatagcgattaaaaaatatttttgttaggatacgttaggtttttattaagaggaatttgtaaaatttgattatttattttttgagtttgaatagagtttggtttttgggaaataatttaaggataagatgaaatttgacgtttgttttattagattttgttgggaatatagttttaaggaaaaagtaatgagaaaagtttatttattaaagttataaattttaattttttggttagtatatttcggtttagttagaaaaaaagtagaaataagaagttaaggttaaggtttgttgttttggttaggaggaggggtgtagtttttatgttgaggagagttgtttttggtaggagttaggaggaattgttattattttaaaagtttgtagaggggaagttatttaattaagggattgaaagggaaggaggagttatatttataagtagtaaagtttttaggaagcgtagggtaggtttggtatgtaaataatgttatgtaaattttgagttgagagagattatagtttttttatttaagttaggatattaaggttaagagcggggaaagttgttgattaaggttatagagtatgttagtagatatttttatttttgtttttagtttatttttatttttgttttttgtttttttttttttgagatagagttttgttttgttatttaggttggagtatagtggtataattttagtttattgtaaatttcgttttttaggtttaagtaatttttttgttttagtttttttgagtagttgggattataggcgtgtattattatattcggcgaatttttgtatttttagtagagacggggttttattatgttggttaggttggtttttaatttttaatcgtatgattcgtttgttttggttttttaaagtgttgagattataggtatgagttattgtgttaagttagtttatttttattttttttttagatagggtatgatatagcgttggatttgtggttgttatttgggaaagggatttattttgattttagaaattttagattagtgatttttaatttgttgggagtttaaagttataggattgaaatttggaaggaaatataggtgttgatatatttggggtttatttttatgttaaatatggttatttttttaaaaatttttatgtagtttatagaggtatttttaaattaaagaagaaaagtaatagtaagtttattttgaaaaattttaggttgggcgtggtggtttatgtttgtaattttagtattttgggaggtcgaggtgggtagattatttgaggttaggagttaagattagtttggttagtatggtgaaattttatttttattaaaaatataaaaaaaaaaaattagtttggcgtggtggtatatgtttatagttttagttatttgggaggcgaggtaggagagttatttgaatttaggaggtggaggttgtagtgagtcgagattgtgttattgtattttagtttgagtgatagagtaagattttattttaaaatatagtaaaataaataaataataataaaaaataaataaaagaaaaattttagttatattttaagataattggatattatttgtggtattttaaaattagattggaggtttttttttaaatttgatagagttttttaagaaagtaaaaagtttaaatttataattttatattattagttattaattttggttataagttttaaattttgagtgagttatatttttgtttttttagttatgattttattggggatattataaaaggcgatttagattgatggaattttgttttttattttttttaatttgttagttttattataggttaaaataatataaatttgaggtgtatattgagattttgtaagatttgggggtagagttgtttgttatgatatttttattataatggtagagggagaataatggtttattcgtaatttgttttttggtatattgcgtttatttgtggtaggaggattgtgtttttatgtgattataggatgttttggaatgtggtatatgggagaattgttttttttttcggtagtaggaaatatgcgtaaataggttgggtatggtggtttacgtttgtaattttattattttgggaggttgaggtgggtagattatttgagattaggagttcgagattagtttggttaatgtggtgaaattttatatttattaaaaatataaaaattagttaggtgtggtggtgggagtttgtaattttagttatttgggaggttggggtaggagaattatttgaattcgggaggttgaggttgtagtgagttgagattatattattgtattttagtttgggtaatagagtgagattttgttttttttttaaaaaaaaaaaaaaatgtgtaaataataaatgtatgtgtgattaggattaattatttaagggaatttgtaattttttttttgttattatattttcgatttgttagtttatattgttaattttaatgagtaagattttgaggaaatgggtgtaagaaaaaggaaataaaaattgggaggttttttagtttagggtatatatgaagttgatatattaatttttgttgtgtgtattaggtaatttgagaaaggaagttttagtatttatgtattatttataggtaaatttttgaattatattttttaaattgtgttagatgtttgtttttattgaatgttttatttttttagttatttgtttgggtttttgttttatttttttttttgttttatttttggattggtgtttggaattattttagtaatagttttagatttttttgataatgaagattgattttataatttatttatattatgttgtattggttggataaattttttttttgatttagattttaattttttttgtggtatcgtttgtggggtttttttagttttttaagtgagaagggtaataataataaagttttttttgaaaattagaaaaagtttgtttgaattgaatatattttaatttaaatttaatttaagttgaattaaatggtttatatttttattttaattattatttttatttttattttgattatttagttataaggggagaagaagtatttaaagttataaatgtagagttttgaaaaatttgaatattatgaaatggagtgtaaaagatttttaatttagatgaaatttgttttagaatgttttgtggtattttgaattttgaatttaataaggtttttgtaaagatataagggttatttgggataaatatatggatatagtatgtattagtttacgtttatattgttttgaagaaatatttaagattgggtaatttataaagaaaaataaatttaatggatttaaagttttatatggttggggaggttttataattatgatggaaggtgaaggagaagtaaaggtatattttatatggtagtaggtaagagagtgtgtgtagggaaattgttttttataaaattattagattttatgagatttaattattgttataagaatagtatgggaaaagtttttttttacgatttaattattttttattaggtattttttatgatatgtggggattatgggagttataatttaagatgagatttttgtggggatattgttaaattatattatagtaatattaaaagtgagatttgaaaaaatattgggaagtttttatgtaagagtttagggtgttaataattttttatgattagtaggatttattgattgaattatttgtgtttttttgttgtatttttttttttatatgttaagtgtttaattttaaatgaattgttttaatgaatagttagaaagttttataagtggagtaggttaggatttttgaaaattagatttttagatagatatttgtatgtaggaagtttattaaggagtgtatttaggattaattttagtggtgggtagagaaataattaaggttgggtagagggagaagttgatttgtaatgtaatattgttgaagatgttagttgattttgttataagttttgaagataggagggttttttagggttgttttgaattgaggtgaggagttaggttttttttattagttagttattggacgtagtttgtttttggtagggagtatgattatggataaggtaaaggtgatttttttttgttaaaataatttttaaaggggttgttagttgagtgatgttaaataaatttttaagagttaggagtaatgaatttttgggtagtgtaatatagaatttatgatgatgaatatttataggaaaaaaattgtgatttttagtagattatagtttatgaaagtattaaatatgtttttgattataagagtttgagttgggaggtgagatttattagtaagtatatggttgtttattagtattataaggaagattgtgtttaatttgtttggttttttatggtttttataattgtattatttgatttttagggttttatgaattattgggtatttaataatattgattgattaattgttaatataaatgtaaatgattgtattagagttttgttataatgtgaattgttttgaggtaaaatttaataagatggttttagaataaatgtttttttttttttaaattattattttgtggagggtttttttgttttcggtataaaataattattttattgtttagtatttagataaatattttttataaaattaaagattgtattataagaatgttattaattaaggtgtgtgtatttaggggatttatgtaatggtttaatattttaaaaagtaaagaaagtgttaaaatttttatttttgtttatttttttatttaagaaagaaaaaaaagatttataatggaaatttatttataatggattgttttaaaatgggttattatttggttattaaaaaaagatttaagtattgatatttgttataatatggatgaatttttaaaatattaggttgatattttttttaaaatagaatatatatttgtatgattttatttgtattaaatgtttagaatagaaagattttaggaaatagtttaagattttttaaagattgtttaggatacggagaaaggaggcggagggtgatgatggttgaggggtatgtggtttttttttgggttgttaaaaatagtttaaaattgattgtaatgatatttgtataattttgattatattaaaaattattgaattgtatattttaaatgaatgaattttatgatatttgaattatattttaataaagttgttatttaaataatttattataaaataaatattttaatatttaatataagtatggtaatagaagtatatttttaataaatgaatatatatttattattt

SEQ ID NO: 423 - DNA, 5986 bp, Artificial Sequence
  chemically treated genomic DNA (Homo sapiens)
ttagtttttgtgtatatggtatatattttttataggtaaggattttgataaatatttttttattttttatattgttgagaataatgttttggataatattttatatatggtattgattattgtttaaaattttttaatgttttaatggttttttatatcgttaggttaataataaaagttttatttatgtttatttggttttatttgatttgatgcgttttttttttttttttttttttttaagatagagttttattttgtttttttcgggttggagtgtagtggtacgattttggtttattataattttcgttttttaggtttaagtaatttttttgttttagtttttcgattagttgggattataggcgtgtgttattatgtttagttaatttttgtattattagtagagatagggttttattatgttggttaggttggttttgaatttttgattttaagtgatttatttattttggttttttaaagtgttaggattataggcgtgagtatcgtgtttagttttgatgtttttgttattattttttatttgtttcgttttatttattatgggtttttttgttgttttttgaatatattaggtaagattttattttagagatattttatttgttttttttttagatagttgtatggttgtttttttatgtttttagggttttttttaaaggttattttttttgtgtgtgtgagatggagttttattttgttttttaggttggtgtgtagtggtaagattttggtttattgtaattttcgttttttgtgtttaagttattattttgttttagttttttgagtagttgggattataggtttgtattattatgtttagttaatgtttgtatttgtagtagagatgagttttattatgttggttaggttggttttgaatttttgatattaagtgatttatttgtttttgttttttaaagtgttgggattataggtgtgagttattgtatttggttttaaaggttattttttttatgaggttttttttgattatttatttatattgtgatttttgaaatattttttttttttttttcgtttattgtttttttatagtattttttatttttttatatagtatgtattttttttatgtgttgtgtttattttttgtttttttttttttttttggaatgttagtattattttagtttaaatttgtttgtttatttttgtgtttttagagtttaaggataatgtttggtatagaggaggtatttaataaatatttgttgaaagaaagaaggaataagtaaattaatagaaggtgtttcgtaaatatttgtgaaattgaattaaaagtgttagaaggagatgattgtgaaatttttaaagtttaaaaatatgtgagtttagaagaatggtggagttgagtgttgttttattataaatattttcgaggaaggattgaaattgtgtgtttgcggtgggaggggtagttgggtaaggaatcgtgaattttcgtagaaatatttggggttgtagaatttgggtgagagcgttgtatttgggagttggcgacgttggcggtttgtttatttattttatttgaatatttgtttatgatataggtgtttttttttaagttattttggtttttgtttttttttttaggttgtgaagattatagaaatttgggatggtttatgggacgttttttagttttaagtaggaaaatagtagtgaaaatggtaattaaaatattacgtaggattgggggttttggggaaatagtttattttagagtagtgtagtgtagagtttttcgttttttattagggtttatttttaatattgtttatttgaaaattttttttttggtttattcgtttgtagttgtttattttgtagaaggatggcgttttgatttttacgttttttgtttttttagggattttatagtatttttttttacgcgtcgtcgttattatagtagacgtttgcgtttttattatttgttgtatagattttcggtgttttgattgtaaataaaatattttagattattgtgaggtcgatgtaagtatagtttttttgttggtagttagattttttaaggtggtgtgattgtgatttgtttatttttcgagattaataataataaagcgataaaatggtgtttttatatattagttgaaagatttagtatgtgaaggggatcgaagtgtttattttttatttttatataagatatgaattttatgagtaaaattaaatttttgtggtaaggtgaattattttagaatgtttttatttatatatatgtggtagtttgggtgtttatgtatatggatagatgtatatatatagagtttttgtgttgtttagtaattgttttaaaatttggataattatttaatttttagggtaaggtataaattatggtagggaggtttattttaatttttttgtttttttttttttagtttgtagtttaataaattgatagttttaaaagtagaaaaattaaagaggatgagattttttgtttgattttaggtgaatttttttttgttagttaggtaggaagttttgatttgaaaattagttttgggtattgttttttttattgttttttgggtattaatttttgttttttaattttagttgaattagtggatggtgatattataggtttaagatagttgtatttaaatattagtgattataggttatattaaggaaatatttgtaggtaatttagggtttgggaaggagttatttttagttatttgtaagatagtaggatttgtagattatagtataattaaatttagataaaattttgaattagtgagaattattaggaaggaaaggaatagaaaatgaattaatttgagtgttaggagatttgtatttagttttgatttcggtattaatcgaatgtatgtttttggataggaaatttttttgagtttcgatttttttcgtggtaaaaaggagagggttaaattatagggtttcgagggttttttttagttgttatattttggagcgtatgagatgaggtaggtatataaagtggataagatgtggttaagaaaataagttatatattaagtttatttgtagtataggtgtttaagaaaattttgttgttgtgtaatattagaacggaaggttggtttttagtaaaatgtattaattttggtttaaattaagatgatgggtatcgggtatgggggtggggaggtagttgaagatttattgagttttgttttagggtagttttgtttatcgttttattttattttttattacggtgtttaagtttatattgagagagaaatttttagttgtaaaagggagaagagaaacgttggaatattagtatcggacgttaggatatggttgtggtgttttaaaaattattttattatttggagtttgatttcgaggggagtatttttattttttagttttttgaaagtatttattagtatttgaatattgttttgagtttgttggagtagtgaaatttggtgagagagaagggtggaggaaggaaggagttgttgtatttggcggttggatttaggtagaggaaattgttataatttcgggaaagaatagaaaagtagaaagggacgagtttttatacgtagttaatgtttatggttttaattgtgtttgggaaggaagattttgggttaggggtgtattttcgttttttaaaattaaacgtgtttgagatagttataaagtttattaagggatttgagagattagagttttttgttttttttttttaattttgagttttttttttatttttattgagggagagtttgagtttatgataagtgtcgcgtttatttttggttaatttttaaaagaaagacgttcgttttggttttttttttaggtttttagtttttttagggatggtagaaatttttgggttaaggttgagcgaattattgtttattgtttttattagtttttagtaaaggtacgtcggcgggggggcgtttagtttttttagtaaacgtttcgcggtttttttcgtagattacgaggtgggggtcgttggggagggtcgagttgggggtagttcgttatttcggtttttagcgagttgtcggcgattttcgcggttttttggtttaggtttcggtttttcgggcgaggagcgggagggaggtcggggtttaggcgtcgcggcgaattcgttaacgtagcgtcgggtttcgaattttaggtttcgttttaggttttcggtcgtttggttagtttgtttgttttaattttaattttttcgaggttagttagagtaggtttgttggtagtagtatttttttagtagttacgcgattagttaatttttcggcggcgttcggggaggcggcgcgttcgggaacgaggggaggtggcggaatcgcgtcggggttattttaaggtcgcgttcgttagtttcggcggggcggttttcgtcgtcgtaattaatggatttttttttttgtttaaatagattcgtcgtgttaattattttttttttcgttagttttttttttatcgttatattgggttattaaaaaaagggggttcgttttttcggggtgttttttttttttttttttgttttcgtttgtttacggttttgcgatttcgacgtcggtaaggtttggagagcggttgggttcgcgggattcgcgggtttgtattcgtttagattcggacgggttttgttatttttttcgtttgtttggttttttttttttttcgttttttcgttcgttagtttatttgattagcggagattcggcggtcgggtcggggttttttcgtagtttttgcgcgtttttagagttcgggtcgtggttcgtcggggtttgtgttttttggtttcgagggtagtcgttgggttttcgagaggggttcgggttgcgtaggggcgttttgttttgttcggttttgtttttttgagagtgcgagagaggcggtcgtgtagattcgggagaaagatgttaaacgtgcgagtgtttaacgggagttttagtttggagcggatggacgttaggtaggcggagtattttaagttttcggtttgtaggaattttttcggttcggtggattacgaagagttaattcgggatttggagaagtattgtagagatatggaagaggcgagttagcgtaagtggaatttcgatttttagaattataaatttttagagggtaagtacgagtggtaagaggtggagaagggtagtttgttcgagttttattatagattttcgcggttttttaaaggtgtttgtaaggtgtcggcgtaggagagttaggatgttagcgggagtcgttcggcggcgtttttaattggggtttcggttaattttgaggatacgtatttggtggatttaaagattgattcgtcggatagttagacggggttagcggagtaatgcgtaggaataaggaagcgatttgtaatcgacggtaatgatttttttttaattatagaatgtgtttggggtttcgttttgtttgttggagggtgttaattttagtttgtttttcggcgtattttgatttagttttgggagagttaattttattggttttaggtgtttagtgttatttggtttattgtttgtttgtttgtgatttttaagttagaaattggagatggtaagattcgataatttttttaatttaatatatcgcggttttttttattagtaatttttaggtatgtgataaagttgggatgtttattaacggttcgttttttggttagggaaagagttttggggcggagaatgtattttttgttttttgaaaataattttattttgtgtttttaaaagttattggggatgacggatttaggattgtgggtggaggtagtgggttttttattttttgattatggggttaatttttgttagttattgttttttttaataaagattgtgtgttttttttaaaaattttttttgcgtttaga

SEQ ID NO: 424 - DNA, 5986 bp, Artificial Sequence
  chemically treated genomic DNA (Homo sapiens)
tttaagcgtaggggaaatttttaaaaagaatatataatttttattagaaaaaataatggttggtagaagttggttttatagttaggggatgaaaaatttattatttttatttataattttggattcgttatttttagtggtttttaagggtataaaatgaggttgtttttaaaaaatagaaagtgtatttttcgttttagagttttttttttagttaggaggcggatcgttgataaatattttaattttgttatatatttaggagttgttagtgagagggatcgcgatgtattaagttagggaaattatcggattttattatttttagtttttgatttaaaagttataaatagataagtagtgggttaggtagtattgaatatttaagattaataaagttagtttttttaaagttaaattagaatacgtcgaaaagtaagttaaggttaatattttttagtaggtaaagcggggttttaaatatattttatggttgggaaagggttattatcgtcggttgtaggtcgtttttttatttttgcgtattgtttcgttaatttcgtttggttgttcgacggattagtttttgggtttattaaatgcgtgtttttagagttagtcggagttttaattaaaggcgtcgtcgggcggttttcgttgatattttggtttttttgcgtcggtattttgtaggtatttttggggggtcgcgggggtttgtagtagaattcgggtaagttgtttttttttattttttgttattcgtatttgttttttaggggtttgtgattttgaaaatcgaaattttatttgcgttggttcgttttttttatgtttttgtagtgtttttttaagtttcgggttaatttttcgtggtttatcgggtcgaagaggtttttgtaggtcgagggtttggggtgtttcgtttgtttggcgtttattcgttttaggttagggttttcgttagatattcgtacgtttgatatttttttttcgggtttgtacgatcgtttttttcgtatttttaaaaaaataaaatcgaataaaataaagcgtttttacgtagttcgaatttttttcggaagtttagcgattgttttcggagttaaaagatatagatttcgacgagttacggttcgagttttaggagcgcgtaggggttgcggggaagtttcggttcggtcgtcgagttttcgttgattaaatggattggcgagcgggagggcggagaggagaggggattaggtaagcggagagggtggtaaagttcgttcgagtttgggcgggtgtaagttcgcgggtttcgcgaatttagtcgttttttaaattttgtcggcgtcggagtcgtagagtcgtgagtaagcggggataggggagggggagaaaaatatttcgaaaagacgagttttttttttttagtggtttaatatggcggtggaagggaggttgacgaagaagaaaatgattgatacggcgagtttatttaaatagaggaggagatttattggttgcggcggcgggagtcgtttcgtcgaggttggcgagcgcggttttaaggtggtttcggcgcggtttcgttattttttttcgttttcgagcgcgtcgttttttcgagcgtcgtcgggagattggttggtcgcgtgattgttggaggggtattgttgttaataaatttgttttggttggtttcggagaaattaaaattaagataaataaattagttaaacggtcgggaatttggggcggggtttgaggttcggggttcggcgttgcgttggcgggttcgtcgcggcgtttaagtttcgatttttttttcgtttttcgttcgggaagtcgggatttggattagaggatcgcgaaggtcgtcggtagttcgttaggagtcggggtggcgagttgtttttagttcggttttttttagcggtttttatttcgtggtttgcgggggaggtcgcggagcgtttgttgggggggttgggcgttttttcgtcggcgtgtttttgttgggggttggtggaggtagtgggtaatggttcgtttagttttaatttagaagtttttgttatttttggggaggttgggggtttagggaagaagttaaagcgaacgttttttttttagaaattagttaggagtagacgcggtatttattatgaatttaagtttttttttaatgaaaataagaaaggaatttaagattaaaaaaaaaaaataaaaaattttagttttttaagttttttaataaattttgtagttgttttagatacgtttagttttgaaaaacgagggtatatttttggtttaggatttttttttttaagtatagttaaggttatggatattggttgcgtgtgggaattcgtttttttttatttttttgttttttttcgggattgtagtagttttttttatttgagtttagtcgttaaatataatagtttttttttttttttattttttttttttattagattttattgttttaataaatttagaataatatttagatgttagtgaatgtttttagagggttgaagggtgaaaatatttttttcggggttaaattttagatgatgaaatgatttttaaaatattataattatgttttaacgttcgatattagtattttagcgtttttttttttttttttgtagttggaaattttttttttagtgtgggtttgagtatcgtggtggaaggtaaagtaggacgatgagtagggttgttttgagataaagtttagtggatttttaattgtttttttatttttatgttcggtatttattattttggtttgagttaaagttaatgtattttattggaaattaatttttcgttttaatattatatagtagtaaagtttttttaagtatttatgttatagatgagtttgatgtgtagtttgtttttttagttatattttgtttattttgtgtgtttattttattttatacgttttagaatgtgatagttggaagggattttcgggattttgtggtttaatttttttttttttattacggaggaaatcgagatttagagaggttttttgtttagggatatgtattcggttggtatcggagttaggattagatgtaagttttttaatatttaggttggtttattttttgttttttttttttttaatggtttttattggtttagggttttgtttgagtttgattgtgttgtagtttgtaggttttgttgttttataagtgattgaaaatggtttttttttaggttttgggttgtttgtagatgtttttttgatgtggtttgtggttattgatatttaaatgtagttgttttgagtttgtggtattattatttattagtttaattaaaattgaaggataggggttgatatttagagaatagtaaagggggtagtgtttagaattagtttttaagttaggattttttatttaattgatagaaaagaatttatttaggattaagtaagaggttttattttttttagtttttttatttttaaggttgttaatttattggattgtagattgggggaaaaggaataggaaaattagggtaggtttttttattataatttatattttattttagaaattagataattgtttaaattttaaaataattgttagataatataggaattttatatatgtgtatttatttatatgtataaatatttaaattattatatgtatgtaaatggagatattttagagtagtttattttgttatagaagtttgattttatttatggaatttatgttttatatggaagtggaaaataaatatttcgattttttttatatgttgaattttttaattaatatgtaggagtattattttgtcgttttgttgttgttgatttcgaaaagtaagtaagttatagttatattattttaagaagtttggttgttagtagaaaggttgtgtttatatcgattttataatgatttaaagtgttttgtttatagttaaggtatcggagatttgtatagtaaataatgagaacgtaggcgtttgttgtagtagcgacgacgcgtgaaaaaaaatattatggagtttttgaaggaatagggagcgtagagattagagcgttatttttttgtaaagtgggtagttgtaagcgagtaagttagggggaaaatttttagataaatagtgttaaaggtggattttggtaaaagacggaaagttttatattgtattgttttaaagtgagttgtttttttaaaatttttagttttgcgtgatgttttggttgttatttttattgttgtttttttatttagggttgagaagcgttttataagttattttagatttttgtaatttttataatttgaggagagaggtaaagattaaaataatttaagagaaaatatttgtgttatagataagtgtttagatggggtgaatgagtaagtcgttagcgtcgttagtttttagatgtagcgtttttatttaagttttgtagttttaaatgtttttgcgaaggtttacggttttttgtttagttgttttttttatcgtaagtatatagttttagttttttttcgaggatgtttataatgaggtagtatttaattttattatttttttaagtttatatatttttagattttgggaattttatagttatttttttttgatatttttaatttaattttataaatatttacggagtattttttattaatttgtttatttttttttttttttaataaatatttattgagtgttttttttatgttagatattatttttaggttttgggaatatagaagtaaataaatagatttaaattagaatgatgttgatattttaaaaaggggagaggagatagaaaatgaatatagtatatgaaagaagtatatattatgtaaggaggtgaaaaatgttatggagaaataataagcggagagggaaaaggaagtgttttaaggattataatgtgaataagtggttagggaaggttttatggagaaagtggtttttgaggttaggtgtagtggtttatatttgtaattttagtattttgggaggtagaggtaggtggattatttgatgttaggagtttaagattagtttggttaatatgatgaaatttatttttattataaatataaatattagttgggtatggtagtgtaggtttgtaattttagttatttaggaggttgaggtaggataatgatttgaatataggaggcggaggttgtagtgagttaagattttgttattgtatattagtttggaagatagagtgagattttattttatatatataaaaaaggtggtttttgagagaagttttgaagatatgagagagtagttatatagttatttggggaaagagtaaatgaagtgtttttgaggtgggattttgtttaatgtgtttaaggaatagtaggggggtttatggtggatagggcggagtaagtggggagtggtaataggagtattagggttgggtacggtgtttacgtttataattttagtattttggaaggttaaggtgggtggattatttgaggttaggagtttaagattagtttggttaatatggtgaaattttgtttttattaataatataaaaattagttggatatggtggtatacgtttgtgattttagttagtcggaaggttgaggtaggagaattgtttgaatttgggaggcggaggttatagtgagttaagatcgtgttattgtattttagttcgggagagatagagtgagattttgttttaaaaaaaaaaaaaaaaaaaaaaagcgtattagattagataggattaggtaggtataggtagggtttttattattggtttggcgatatggaaagttattggggtattaggaggttttaagtagtgattaatattatgtgtaaggtattgtttaaggtattatttttagtaatgtgggaagtgaagaaatatttgttagagtttttgtttgtggggagtatatattatgtgtataaaaattag

SEQ ID NO: 425 - DNA, 20 bp, Artificial Sequence
  CDK4 primer
aaaaataacacaataactca

SEQ ID NO: 426 - DNA, 20 bp, Artificial Sequence
  CDK4 primer
ttttggtagttggttatatg

SEQ ID NO: 427 - DNA, 16 bp, Artificial Sequence
  CDK4 detection oligonucleotide
gggttggcgtgaggta

SEQ ID NO: 428 - DNA, 16 bp, Artificial Sequence
  CDK4 detection oligonucleotide
gggttggtgtgaggta
